(19) United States
(12) Patent Application Publication
(10) Pub. No.: US 2020/0308234 A1
(43) Pub. Date: Oct. 1, 2020

(54) CHIMERIC ANTIGEN RECEPTOR (CAR) MODULATION

(71) Applicant: TRUSTEES OF BOSTON UNIVERSITY, Boston, MA (US)

(72) Inventors: John NGO, Cambridge, MA (US); Wilson WONG, Brookline, MA (US); Meng Lai Nicole WONG, Watertown, MA (US); Huishan LI, Brookline, MA (US); Elliot P. TAGUE, Brookline, MA (US)

(73) Assignee: TRUSTEES OF BOSTON UNIVERSITY, Boston, MA (US)

(21) Appl. No.: 16/832,751

(22) Filed: Mar. 27, 2020

Related U.S. Application Data
(60) Provisional application No. 62/826,139, filed on Mar. 29, 2019.

(51) Int. Cl. C07K 14/18; C07K 14/81

(52) U.S. Cl. CPC C07K 14/1833; C07K 14/811; C07K 2319/50; C07K 2319/80; C07K 2319/02; C07K 2319/03

(57) ABSTRACT

The technology described herein is directed to CAR polypeptides and systems comprising repressible proteases. In combination with a specific protease inhibitor, the activity of said CAR polypeptides and systems and cells comprising them can be modulated. Also described herein are methods of using said CAR polypeptides and systems, for example to treat various diseases and disorders.

### CROSS-REFERENCE TO RELATED APPLICATIONS

[0001] This application claims benefit under 35 U.S.C. § 119(e) of U.S. Provisional Application No. 62/826,139 filed Mar. 29, 2019, the contents of which are incorporated herein by reference in their entirety.

### SEQUENCE LISTING

[0002] The instant application contains a Sequence Listing which has been submitted in ASCII format via EFS-Web and is hereby incorporated by reference in its entirety. Said ASCII copy, created on, Mar. 25, 2020, is named 701586-094980USPT_SL.txt and is 857,297 bytes in size.

### TECHNICAL FIELD

[0003] The technology described herein relates to compositions, systems, and methods directed at chimeric antigen receptor (CAR) modulation.

### BACKGROUND

[0004] Adoptive T cell therapy represents one of the most exciting forms of cancer therapy. Two approved CAR T cell therapies developed by NOVARTIS and KITE PHARMA/GILEAD are being used to treat acute lymphoblastic leukemia (ALL) and lymphoma respectively. Though clinical results have been promising, T cell overactivity leading to cytokine release syndrome (CRS) is still a major issue to contend with. Such cytokine storms can lead to organ failure or death in severe cases. While drug-inducible suicide switches have been developed to kill overactive T cells, this is an irreversible action as these cells can no longer be reused. Considering the high cost of CAR-T therapy, such a suicide-switch approach can be disagreeable to patients who may require future use of the engineered cells. Furthermore, while several inducible switches are currently available, none of them are regulated by FDA-approved molecules. As such, there is an urgent need for safety-control switch CAR technology, especially if the control-switch makes use of an FDA-approved drug with a favorable toxicity profile and pharmacokinetics.

### SUMMARY

[0005] The technology described herein is directed to drug-inducible and drug-repressible CAR polypeptides and systems. In particular, described herein are CAR polypeptides comprising a repressible protease, such that the activity of the CAR polypeptide can be controlled by a protease inhibitor. The CAR polypeptides also comprise additional components such that presence of a specific protease inhibitor either activates or inactivates the CAR polypeptide, thus activating or inactivating the anti-cancer activity of the cell expressing the polypeptide. Such cellular activation or inactivation can be reversible, upon removal of the protease inhibitor.

[0006] In particular embodiments, the repressible protease is the non-structural protein 3 (NS3) protease domain, which originates from the hepatitis C virus (HCV). The NS3 protease is especially useful as multiple protease inhibitors (e.g., danoprevir and grazoprevir amongst others) are approved for administration to human subjects, with a demonstrated safety profile. Varying the concentration of the protease inhibitor can modulate the CAR polypeptide activity, thus allowing for a technology that is customizable to the patient. The CAR polypeptides described herein thus provide flexible control over T cell activity and improve the safety of adoptive T cell therapy. The NS3 CAR polypeptides described herein are also functional in NK cells and regulatory T cells.

[0007] Described herein are four general frameworks of drug-controllable CAR polypeptides and systems comprising repressible proteases: (1) drug-inducible CAR polypeptides (i.e., ON-switches); (2) drug-inducible two-component logic-switch CAR polypeptide systems (i.e., AND-gates); (3) drug-repressible CAR polypeptide systems (i.e., OFF-switches); and (4) drug-inducible reader CAR polypeptide systems that are responsive to a specific protease inhibitor (i.e., reader CARs). Also described herein are polynucleotides and vectors encoding said CAR polypeptides, cells expressing said CAR polypeptides, pharmaceutical compositions comprising said CAR polypeptides, and methods of using said CAR polypeptides.

[0008] In one aspect described herein is a polypeptide comprising: (a) an extracellular binding domain; (b) a transmembrane domain; (c) at least one intracellular signaling domain; and (d) a repressible protease.

[0009] In some embodiments of any of the aspects, the repressible protease is located: (a) between the transmembrane domain and the first intracellular signaling domain; (b) between the first intracellular signaling domain and the second intracellular signaling domain; or (c) between the second intracellular signaling domain and the third intracellular signaling domain.

[0010] In some embodiments of any of the aspects, the repressible protease is hepatitis C virus (HCV) nonstructural protein 3 (NS3).

[0011] In some embodiments of any of the aspects, the polypeptide further comprises a cofactor for the repressible protease.

[0012] In some embodiments of any of the aspects, the cofactor is an HSV NS4A domain.

[0013] In some embodiments of any of the aspects, the HSV NS4A domain is adjacent and N-terminal to the repressible protease.

[0014] In some embodiments of any of the aspects, the polypeptide further comprises at least one protease cleavage site of the repressible protease.

[0015] In some embodiments of any of the aspects, the repressible protease and the at least one protease cleavage site are physically linked to one another.

[0016] In some embodiments of any of the aspects, in the at least one protease cleavage site is located: (a) between the transmembrane domain and the first intracellular signaling domain; (b) between the first intracellular signaling domain and the second intracellular signaling domain; and/or (c) between the second intracellular signaling domain and the third intracellular signaling domain.

[0017] In some embodiments of any of the aspects, the polypeptide is cleaved when a protease inhibitor is not bound to the repressible protease.

[0018] In some embodiments of any of the aspects, the N-terminal amino acid of the cleaved polypeptide is associated with a high degradation rate and a low half-life.

[0019] In some embodiments of any of the aspects, the polypeptide is in combination with a protease inhibitor bound to the repressible protease.

[0020] In some embodiments of any of the aspects, the protease inhibitor is selected from grazoprevir (GZV), danoprevir, simeprevir, asunaprevir, ciluprevir, boceprevir, sovaprevir, paritaprevir, ombitasvir, paritaprevir, ritonavir, dasabuvir, and telaprevir.

[0021] In some embodiments of any of the aspects, the polypeptide is not cleaved when the protease inhibitor is bound to the repressible protease.

[0022] In some embodiments of any of the aspects, the polypeptide comprises from the N-terminus to the C-terminus: (a) an extracellular binding domain; (b) a transmembrane domain; (c) at least one intracellular signaling domain; (d) a first protease cleavage site; (e) a repressible protease; (f) a second protease cleavage site; and (g) at least one intracellular signaling domain.

[0023] In some embodiments of any of the aspects, the polypeptide comprises from the N-terminus to the C-terminus: (a) an extracellular binding domain; (b) a transmembrane domain; (c) a first intracellular signaling domain; (d) a second intracellular signaling domain; (e) a first protease cleavage site; (f) a repressible protease; (g) a second protease cleavage site; and (h) a third intracellular signaling domain.

[0024] In some embodiments of any of the aspects, the polypeptide comprises from the N-terminus to the C-terminus: (a) an extracellular binding domain; (b) a transmembrane domain; (c) a first intracellular signaling domain; (d) a first protease cleavage site; (e) a repressible protease; (f) a second protease cleavage site; (g) a second intracellular signaling domain; and (h) a third intracellular signaling domain.

[0025] In some embodiments of any of the aspects, the polypeptide comprises from the N-terminus to the C-terminus: (a) an extracellular binding domain; (b) a transmembrane domain; (c) a first protease cleavage site; (d) a repressible protease; (e) a second protease cleavage site; and (f) at least one intracellular signaling domain.

[0026] In some embodiments of any of the aspects, the polypeptide comprises from the N-terminus to the C-terminus: (a) an extracellular binding domain; (b) a transmembrane domain; (c) a first protease cleavage site; (d) a repressible protease; (e) a second protease cleavage site; (f) a first intracellular signaling domain; (g) a second intracellular signaling domain; and (h) a third intracellular signaling domain.

[0027] In some embodiments of any of the aspects, the at least one intracellular signaling domain comprises first and second intracellular signaling domains.

[0028] In some embodiments of any of the aspects, the at least one intracellular signaling domain comprises first, second, and third intracellular signaling domains.

[0029] In some embodiments of any of the aspects, each of the at least one intracellular signaling domains independently comprises an intracellular signaling domain selected from the group consisting of: TCRC; FcRy; FcRp; CD3zeta; CD3y; CD35; CD3s; CD3C; CD22; CD79a; CD79b; CD66d; CARD 11; CD2; CD7; CD27; CD28; CD30; CD40; CD54 (ICAM); CD83; CD134 (OX40); CD137 (4-1BB); CD150 (SLAMF1); CD152 (CTLA4); CD223 (LAG3); CD270 (HVEM); CD273 (PD-L2); CD274 (PD-Ll); CD278 (ICOS); DAP10; LAT; KD2C SLP76; TRIM; ZAP70; and 41BB.

[0030] In some embodiments of any of the aspects, the first, second, and third intracellular signaling domains comprise the intracellular signaling domains of CD28, 4-1BB, and CD3zeta, respectively.

[0031] In some embodiments of any of the aspects, the transmembrane domain is located between the extracellular binding domain and the at least one intracellular signaling domain.

[0032] In some embodiments of any of the aspects, the transmembrane domain comprises the transmembrane domain of CD28.

[0033] In some embodiments of any of the aspects, the extracellular binding domain is an antibody, an antigen-binding fragment thereof, a F(ab) fragment, a F(ab′) fragment, a single chain variable fragment (scFv), or a single-domain antibody (sdAb).

[0034] In some embodiments of any of the aspects, the extracellular binding domain comprises a scFv.

[0035] In some embodiments of any of the aspects, the extracellular binding domain specifically binds to a tumor antigen.

[0036] In some embodiments of any of the aspects, the polypeptide further comprises a leading peptide located N-terminal to the extracellular binding domain.

[0037] In some embodiments of any of the aspects, the leading peptide is a CD8alpha leading peptide.

[0038] In some embodiments of any of the aspects, the polypeptide further comprises a spacer domain located between the extracellular binding domain and the transmembrane domain.

[0039] In some embodiments of any of the aspects, the spacer domain comprises a CD8 hinge domain.

[0040] In some embodiments of any of the aspects, the polypeptide further comprises a first detectable marker adjacent to and C terminal of the extracellular binding domain.

[0041] In some embodiments of any of the aspects, the polypeptide further comprises a second detectable marker adjacent and N-terminal to the repressible protease.

[0042] In some embodiments of any of the aspects, the polypeptide further comprises a third detectable marker adjacent to and C-terminal to the repressible protease.

[0043] In some embodiments of any of the aspects, the first, second, or third detectable marker is selected from GFP, V5, HA1, Myc, VSV-G, HSV, FLAG, HIS, mCherry, AU1, and biotin.

[0044] In some embodiments of any of the aspects, the polypeptide comprises one of SEQ ID NO: 34-36 or a sequence that is at least 70% identical to one of SEQ ID NO: 34-36 that maintains the same function.

[0045] In one aspect described herein is a polypeptide comprising: (a) an extracellular binding domain; (b) a transmembrane domain; (c) a repressible protease; and (d) at least one intracellular signaling domain.

[0046] In some embodiments of any of the aspects, the repressible protease is hepatitis C virus (HCV) nonstructural protein 3 (NS3).

[0047] In some embodiments of any of the aspects, the polypeptide further comprises a cofactor for the repressible protease.

[0048] In some embodiments of any of the aspects, the cofactor is an HSV NS4A domain.

[0049] In some embodiments of any of the aspects, the HSV NS4A domain is adjacent and N-terminal to the repressible protease.

[0050] In some embodiments of any of the aspects, the polypeptide further comprises at least one protease cleavage site of the repressible protease.

[0051] In some embodiments of any of the aspects, the repressible protease and the at least one protease cleavage site are physically linked to one another.

[0052] In some embodiments of any of the aspects, the repressible protease and at least one protease cleavage site are located in between the transmembrane domain and the intracellular signalling domain.

[0053] In some embodiments of any of the aspects, the polypeptide is cleaved when a protease inhibitor is not bound to the repressible protease.

[0054] In some embodiments of any of the aspects, the N-terminal amino acid of the cleaved polypeptide is associated with a high degradation rate and a low half-life.

[0055] In some embodiments of any of the aspects, the polypeptide is in combination with a protease inhibitor bound to the repressible protease.

[0056] In some embodiments of any of the aspects, the protease inhibitor is selected from grazoprevir (GZV), danoprevir, simeprevir, asunaprevir, ciluprevir, boceprevir, sovaprevir, paritaprevir, ombitasvir, paritaprevir, ritonavir, dasabuvir, and telaprevir.

[0057] In some embodiments of any of the aspects, the polypeptide is not degraded when the protease inhibitor is bound to the repressible protease.

[0058] In some embodiments of any of the aspects, the polypeptide comprises from the N-terminus to the C-terminus: (a) an extracellular binding domain; (b) a transmembrane domain; (c) a first protease cleavage site; (d) a repressible protease; (e) a second protease cleavage site; and (f) a single intracellular signaling domain.

[0059] In some embodiments of any of the aspects, the extracellular binding domain is an antibody, an antigen-binding fragment thereof, a F(ab) fragment, a F(ab′) fragment, a single chain variable fragment (scFv), or a single-domain antibody (sdAb).

[0060] In some embodiments of any of the aspects, the extracellular binding domain comprises a scFv.

[0061] In some embodiments of any of the aspects, the extracellular binding domain specifically binds to a tumor antigen.

[0062] In some embodiments of any of the aspects, the transmembrane domain is located between the extracellular binding domain and the intracellular signaling domain.

[0063] In some embodiments of any of the aspects, the intracellular signaling domain comprises the intracellular signaling domain selected from TCRC; FcRy; FcRp; CD3zeta; CD3y; CD35; CD3s; CD3C; CD22; CD79a; CD79b; CD66d; CARD11; CD2; CD7; CD27; CD28; CD30; CD40; CD54 (ICAM); CD83; CD134 (OX40); CD137 (4-1BB); CD150 (SLAMF1); CD152 (CTLA4); CD223 (LAG3); CD270 (HVEM); CD273 (PD-L2); CD274 (PD-Ll); CD278 (ICOS); DAP10; LAT; KD2C SLP76; TRIM; ZAP70; and 41BB.

[0064] In some embodiments of any of the aspects, the intracellular signaling domain comprises the intracellular signaling domain of CD3zeta.

[0065] In some embodiments of any of the aspects, the polypeptide further comprises a leading peptide located N-terminal to the extracellular binding domain.

[0066] In some embodiments of any of the aspects, the leading peptide is a CD8alpha leading peptide.

[0067] In some embodiments of any of the aspects, the polypeptide further comprises a spacer domain located between the extracellular binding domain and the transmembrane domain.

[0068] In some embodiments of any of the aspects, the spacer domain comprises a CD8 hinge domain.

[0069] In some embodiments of any of the aspects, the polypeptide further comprises a first detectable marker adjacent to and C terminal of the extracellular binding domain.

[0070] In some embodiments of any of the aspects, the polypeptide further comprises a second detectable marker adjacent and N terminal to the repressible protease.

[0071] In some embodiments of any of the aspects, the polypeptide further comprises a third detectable marker adjacent to and C terminal to the repressible protease.

[0072] In some embodiments of any of the aspects, the first, second, or third detectable marker is selected from GFP, V5, HA1, Myc, VSV-G, HSV, FLAG, HIS, AU1, mCherry, and biotin.

[0073] In some embodiments of any of the aspects, the polypeptide comprises SEQ ID NO: 38 or a sequence that is at least 70% identical to SEQ ID NO: 38 that maintains the same function.

[0074] In one aspect described herein is a polypeptide comprising: (a) an extracellular binding domain; (b) a transmembrane domain; (c) at least one intracellular signaling domain; and (d) a degron domain.

[0075] In some embodiments of any of the aspects, the degron domain comprises a dihydrofolate reductase (DHFR) degron (DD) or a ligand-induced degradation (LID) domain.

[0076] In some embodiments of any of the aspects, the polypeptide is in combination with a degron stabilizer bound to the degron domain.

[0077] In some embodiments of any of the aspects, the degron is DHFR degron and the degron stabilizer is trimethoprim (TMP) or an analog thereof.

[0078] In some embodiments of any of the aspects, the polypeptide is in combination with a degron destabilizer bound to the degron domain.

[0079] In some embodiments of any of the aspects, the degron is a ligand-induced degradation (LID) domain and the degron destabilizer is Shield-1 or an analog thereof.

[0080] In some embodiments of any of the aspects, the polypeptide is not degraded when the degron stabilizer is bound to the degron domain.

[0081] In some embodiments of any of the aspects, the polypeptide is degraded when the degron destabilizer is bound to the degron domain.

[0082] In some embodiments of any of the aspects, the polypeptide comprises from the N-terminus to the C-terminus: (a) an extracellular binding domain; (b) a transmembrane domain; (c) at least one intracellular signaling domain; and (d) a degron domain.

[0083] In some embodiments of any of the aspects, the extracellular binding domain is an antibody, an antigen-binding fragment thereof, a F(ab) fragment, a F(ab′) fragment, a single chain variable fragment (scFv), or a single-domain antibody (sdAb).

[0084] In some embodiments of any of the aspects, the extracellular binding domain comprises a scFv.

[0085] In some embodiments of any of the aspects, the extracellular binding domain specifically binds to a tumor antigen.

[0086] In some embodiments of any of the aspects, the transmembrane domain is located between the extracellular binding domain and the at least one intracellular signaling domain.

[0087] In some embodiments of any of the aspects, each of the at least one intracellular signaling domains independently comprises an intracellular signaling domain selected from the group consisting of: TCRC; FcRy; FcRp; CD3zeta; CD3y; CD35; CD3s; CD3C; CD22; CD79a; CD79b; CD66d; CARD11; CD2; CD7; CD27; CD28; CD30; CD40; CD54 (ICAM); CD83; CD134 (OX40); CD137 (4-1BB); CD150 (SLAMF1); CD152 (CTLA4); CD223 (LAG3); CD270 (HVEM); CD273 (PD-L2); CD274 (PD-Ll); CD278 (ICOS); DAP10; LAT; KD2C SLP76; TRIM; ZAP70; and 41BB.

[0088] In some embodiments of any of the aspects, the intracellular signaling domain comprises the intracellular signaling domain of CD28 and/or 4-1BB.

[0089] In some embodiments of any of the aspects, the polypeptide further comprises a leading peptide located N-terminal to the extracellular binding domain.

[0090] In some embodiments of any of the aspects, the leading peptide is a CD8alpha leading peptide.

[0091] In some embodiments of any of the aspects, the polypeptide further comprises a spacer domain located between the extracellular binding domain and the transmembrane domain.

[0092] In some embodiments of any of the aspects, the spacer domain comprises a CD8 hinge domain.

[0093] In some embodiments of any of the aspects, the polypeptide further comprises a detectable marker adjacent to and C terminal of the extracellular binding domain.

[0094] In some embodiments of any of the aspects, the detectable marker is selected from GFP, V5, HA1, Myc, VSV-G, HSV, FLAG, HIS, AU1, mCherry, and biotin.

[0095] In some embodiments of any of the aspects, the polypeptide comprises SEQ ID NO: 39 or a sequence that is at least 70% identical to SEQ ID NO: 39 that maintains the same function.

[0096] In one aspect described herein is a system comprising a first polypeptide (e.g., a first AND-gate CAR polypeptide as described herein) and a second polypeptide (e.g., a second AND-gate polypeptide).

[0097] In one aspect described herein is a system comprising: (a) a first polypeptide comprising: (i) an extracellular binding domain; (ii) a transmembrane domain; (iii) a repressible protease; and (iv) at least one intracellular signaling domain; and (b) a second polypeptide comprising: (i) an extracellular binding domain; (ii) a transmembrane domain; (iii) at least one intracellular signaling domain; and (iv) a degron domain.

[0098] In some embodiments of any of the aspects, the system is functional only in the presence of the protease inhibitor and the degron stabilizer.

[0099] In some embodiments of any of the aspects, the system is functional only in the presence of the protease inhibitor and the absence of the degron destabilizer.

[0100] In some embodiments of any of the aspects, the first polypeptide comprises a signaling domain.

[0101] In some embodiments of any of the aspects, the signaling domain comprises the signaling domain of CD3zeta.

[0102] In some embodiments of any of the aspects, the second polypeptide comprises a co-stimulatory signaling domain.

[0103] In some embodiments of any of the aspects, the co-stimulatory signaling domain comprises the co-stimulatory signaling domain of CD28 and/or 4-1BB.

[0104] In some embodiments of any of the aspects, the first polypeptide and second polypeptide are physically linked to one another.

[0105] In some embodiments of any of the aspects, the first polypeptide and second polypeptide flank a self-cleaving peptide domain.

[0106] In one aspect described herein is a polypeptide comprising: (a) an extracellular binding domain; (b) a transmembrane domain; and (c) a peptide domain.

[0107] In some embodiments of any of the aspects, the peptide domain is specifically bound by a repressible protease.

[0108] In some embodiments of any of the aspects, the peptide domain is specifically bound by NS3.

[0109] In some embodiments of any of the aspects, the polypeptide comprises from the N-terminus to the C-terminus: (a) an extracellular binding domain; (b) a transmembrane domain; and (c) a peptide domain.

[0110] In some embodiments of any of the aspects, the polypeptide comprises from the N-terminus to the C-terminus: (a) an extracellular binding domain; (b) a transmembrane domain; (c) at least one intracellular signaling domain; and (c) a peptide domain.

[0111] In some embodiments of any of the aspects, the polypeptide comprises from the N-terminus to the C-terminus: (a) an extracellular binding domain; (b) a transmembrane domain; (c) a single intracellular signaling domain; and (d) a peptide domain.

[0112] In some embodiments of any of the aspects, the polypeptide comprises from the N-terminus to the C-terminus: (a) an extracellular binding domain; (b) a transmembrane domain; (c) a first intracellular signaling domain; (d) a second intracellular signaling domain; and (e) a peptide domain.

[0113] In some embodiments of any of the aspects, the extracellular binding domain is an antibody, an antigen-binding fragment thereof, a F(ab) fragment, a F(ab′) fragment, a single chain variable fragment (scFv), or a single-domain antibody (sdAb).

[0114] In some embodiments of any of the aspects, the extracellular binding domain comprises a scFv.

[0115] In some embodiments of any of the aspects, the extracellular binding domain specifically binds to a tumor antigen.

[0116] In some embodiments of any of the aspects, the transmembrane domain is located between the extracellular binding domain and the peptide domain.

[0117] In some embodiments of any of the aspects, the polypeptide further comprises at least one intracellular signaling domain.

[0118] In some embodiments of any of the aspects, each of the at least one intracellular signaling domains independently comprises an intracellular signaling domain selected from the group consisting of: TCRC; FcRy; FcRp; CD3zeta; CD3y; CD35; CD3s; CD3C; CD22; CD79a; CD79b; CD66d; CARD11; CD2; CD7; CD27; CD28; CD30; CD40; CD54 (ICAM); CD83; CD134 (OX40); CD137 (4-1BB); CD150 (SLAMF1); CD152 (CTLA4); CD223 (LAG3); CD270 (HVEM); CD273 (PD-L2); CD274 (PD-Ll); CD278 (ICOS); DAP10; LAT; KD2C SLP76; TRIM; ZAP70; and 41BB.

[0119] In some embodiments of any of the aspects, the at least one intracellular signaling domain comprises the intracellular signaling domain of CD28 and/or 4-1BB.

[0120] In some embodiments of any of the aspects, the polypeptide further comprises a leading peptide located N-terminal to the extracellular binding domain.

[0121] In some embodiments of any of the aspects, the leading peptide is a CD8alpha leading peptide.

[0122] In some embodiments of any of the aspects, the polypeptide further comprises a spacer domain located between the extracellular binding domain and the transmembrane domain.

[0123] In some embodiments of any of the aspects, the spacer domain comprises a CD8 hinge domain.

[0124] In some embodiments of any of the aspects, the polypeptide further comprises a detectable marker adjacent to and C terminal of the extracellular binding domain.

[0125] In some embodiments of any of the aspects, the detectable marker is selected from GFP, V5, HA1, Myc, VSV-G, HSV, FLAG, HIS, AU1, mCherry, and biotin.

[0126] In some embodiments of any of the aspects, the polypeptide comprises SEQ ID NO: 84, SEQ ID NO: 85, or a sequence that is at least 70% identical to SEQ ID NO: 84 or SEQ ID NO: 85 that maintains the same function.

[0127] In one aspect described herein is a polypeptide comprising: (a) an extracellular domain; (b) a transmembrane domain; (c) a repressible protease; and (d) at least one intracellular signaling domain.

[0128] In some embodiments of any of the aspects, the repressible protease is hepatitis C virus (HCV) nonstructural protein 3 (NS3).

[0129] In some embodiments of any of the aspects, the NS3 is catalytically dead.

[0130] In some embodiments of any of the aspects, the polypeptide does not comprise any protease cleavage sites.

[0131] In some embodiments of any of the aspects, the repressible protease is located: (a) between the transmembrane domain and the at least one intracellular signaling domain; (b) between the first intracellular signaling domain and the second intracellular signaling domain; or (c) at the C terminus of the polypeptide.

[0132] In some embodiments of any of the aspects, the polypeptide is in combination with a protease inhibitor bound to the repressible protease.

[0133] In some embodiments of any of the aspects, the protease inhibitor is selected from grazoprevir (GZV), danoprevir, simeprevir, asunaprevir, ciluprevir, boceprevir, sovaprevir, paritaprevir, ombitasvir, paritaprevir, ritonavir, dasabuvir, and telaprevir.

[0134] In some embodiments of any of the aspects, the polypeptide further comprises a cofactor for the repressible protease.

[0135] In some embodiments of any of the aspects, the cofactor is an HSV NS4A domain.

[0136] In some embodiments of any of the aspects, the HSV NS4A domain is adjacent and N-terminal to the repressible protease.

[0137] In some embodiments of any of the aspects, the polypeptide comprises from the N-terminus to the C-terminus: (a) an extracellular domain; (b) a transmembrane domain; (c) at least one intracellular signaling domain; (d) a repressible protease; and (e) at least one intracellular signaling domain.

[0138] In some embodiments of any of the aspects, the polypeptide comprises from the N-terminus to the C-terminus: (a) an extracellular domain; (b) a transmembrane domain; (c) a first intracellular signaling domain; (d) a repressible protease; and (e) a second intracellular signaling domain.

[0139] In some embodiments of any of the aspects, the polypeptide comprises from the N-terminus to the C-terminus: (a) an extracellular domain; (b) a transmembrane domain; (c) at least one intracellular signaling domain; and (d) a repressible protease.

[0140] In some embodiments of any of the aspects, the polypeptide comprises from the N-terminus to the C-terminus: (a) an extracellular domain; (b) a transmembrane domain; (c) a first intracellular signaling domain; (d) a second intracellular signaling domain; and (e) a repressible protease.

[0141] In some embodiments of any of the aspects, the polypeptide comprises from the N-terminus to the C-terminus: (a) an extracellular domain; (b) a transmembrane domain; (c) a single intracellular signaling domain; and (d) a repressible protease.

[0142] In some embodiments of any of the aspects, the polypeptide comprises from the N-terminus to the C-terminus: (a) an extracellular domain; (b) a transmembrane domain; (d) a repressible protease; and (e) at least one intracellular signaling domain.

[0143] In some embodiments of any of the aspects, the polypeptide comprises from the N-terminus to the C-terminus: (a) an extracellular domain; (b) a transmembrane domain; (c) a repressible protease; and (d) a single intracellular signaling domain.

[0144] In some embodiments of any of the aspects, the extracellular domain comprises the extracellular domain of DAP10.

[0145] In some embodiments of any of the aspects, the transmembrane domain comprises the transmembrane domain of CD8.

[0146] In some embodiments of any of the aspects, each of the at least one intracellular signaling domains independently comprises an intracellular signaling domain selected from the group consisting of: TCRC; FcRy; FcRp; CD3zeta; CD3y; CD35; CD3s; CD3C; CD22; CD79a; CD79b; CD66d; CARD 11; CD2; CD7; CD27; CD28; CD30; CD40; CD54 (ICAM); CD83; CD134 (OX40); CD137 (4-1BB); CD150 (SLAMF1); CD152 (CTLA4); CD223 (LAG3); CD270 (HVEM); CD273 (PD-L2); CD274 (PD-Ll); CD278 (ICOS); DAP10; LAT; KD2C SLP76; TRIM; ZAP70; and 41BB.

[0147] In some embodiments of any of the aspects, the at least one intracellular signaling domain comprises the intracellular signaling domain of 4-1BB and/or CD3zeta.

[0148] In some embodiments of any of the aspects, the polypeptide further comprises at least one detectable marker at the C-terminal end of the polypeptide.

[0149] In some embodiments of any of the aspects, the detectable marker is selected from GFP, V5, HA1, Myc, VSV-G, HSV, FLAG, HIS, AU1, mCherry, and biotin.

[0150] In some embodiments of any of the aspects, the polypeptide comprises one of SEQ ID NOs: 86-89 or a sequence that is at least 70% identical to one of SEQ ID NOs: 86-89 that maintains the same function.

[0151] In one aspect described herein is a system comprising a first polypeptide (e.g., a first OFF-switch CAR polypeptide as described herein) and a second polypeptide (e.g., a second OFF-switch CAR polypeptide as described herein).

[0152] In one aspect described herein is a system comprising: (a) a first polypeptide comprising: (i) an extracellular binding domain; (ii) a transmembrane domain; and (iii) a peptide domain; and (b) a second polypeptide comprising: (i) an extracellular domain; (ii) a transmembrane domain; (iii) a repressible protease; and (iv) at least one intracellular signaling domain.

[0153] In some embodiments of any of the aspects, the second polypeptide specifically binds to the first polypeptide.

[0154] In some embodiments of any of the aspects, the system is in combination with a protease inhibitor bound to the repressible protease of the second polypeptide.

[0155] In some embodiments of any of the aspects, the protease inhibitor is selected from grazoprevir (GZV), danoprevir, simeprevir, asunaprevir, ciluprevir, boceprevir, sovaprevir, paritaprevir, ombitasvir, paritaprevir, ritonavir, dasabuvir, and telaprevir.

[0156] In some embodiments of any of the aspects, the second polypeptide does not specifically bind the first polypeptide in the presence of the protease inhibitor.

[0157] In some embodiments of any of the aspects, the first polypeptide comprises a co-stimulatory signaling domain.

[0158] In some embodiments of any of the aspects, the co-stimulatory signaling domain comprises the co-stimulatory signaling domain of CD28 and/or 4-1BB.

[0159] In some embodiments of any of the aspects, the second polypeptide comprises a signaling domain.

[0160] In some embodiments of any of the aspects, the signaling domain comprises the signaling domain of CD3zeta.

[0161] In some embodiments of any of the aspects, the first polypeptide and second polypeptide are physically linked to one another.

[0162] In some embodiments of any of the aspects, the first polypeptide and second polypeptide flank a self-cleaving peptide domain.

[0163] In some embodiments of any of the aspects, the system comprises one of SEQ ID NOs: 114-121 or a sequence that is at least 70% identical to one of SEQ ID NOs: 114-121 that maintains the same function.

[0164] In one aspect described herein is a polypeptide comprising: (a) an extracellular binding domain; (b) a transmembrane domain; and (c) a reader domain.

[0165] In some embodiments of any of the aspects, the reader domain specifically binds to a repressible protease in the presence of a specific protease inhibitor.

[0166] In some embodiments of any of the aspects, the reader domain is a danoprevir/NS3 complex reader domain (DNCR) or a grazoprevir/NS3 reader complex (GNCR) domain.

[0167] In some embodiments of any of the aspects, the polypeptide comprises from the N-terminus to the C-terminus: (a) an extracellular binding domain; (b) a transmembrane domain; (c) a first intracellular signaling domain; (d) a second intracellular signaling domain; and (e) a reader domain.

[0168] In some embodiments of any of the aspects, the polypeptide comprises from the N-terminus to the C-terminus: (a) an extracellular binding domain; (b) a transmembrane domain; (c) a single intracellular signaling domain; and (d) and a reader domain.

[0169] In some embodiments of any of the aspects, the polypeptide further comprises at least one intracellular signaling domain.

[0170] In some embodiments of any of the aspects, each of the at least one intracellular signaling domains independently comprises an intracellular signaling domain selected from the group consisting of: TCRC; FcRy; FcRp; CD3zeta; CD3y; CD35; CD3s; CD3C; CD22; CD79a; CD79b; CD66d; CARD11; CD2; CD7; CD27; CD28; CD30; CD40; CD54 (ICAM); CD83; CD134 (OX40); CD137 (4-1BB); CD150 (SLAMF1); CD152 (CTLA4); CD223 (LAG3); CD270 (HVEM); CD273 (PD-L2); CD274 (PD-Ll); CD278 (ICOS); DAP10; LAT; KD2C SLP76; TRIM; ZAP70; and 41BB.

[0171] In some embodiments of any of the aspects, the at least one intracellular signaling domain comprises an intracellular signaling domain of CD28, and/or 4-1BB.

[0172] In some embodiments of any of the aspects, the transmembrane domain is located between the extracellular binding domain and the at least one intracellular signaling domain.

[0173] In some embodiments of any of the aspects, the transmembrane domain comprises the transmembrane domain of CD28.

[0174] In some embodiments of any of the aspects, the extracellular binding domain is an antibody, an antigen-binding fragment thereof, a F(ab) fragment, a F(ab′) fragment, a single chain variable fragment (scFv), or a single-domain antibody (sdAb).

[0175] In some embodiments of any of the aspects, the extracellular binding domain comprises a scFv.

[0176] In some embodiments of any of the aspects, the extracellular binding domain specifically binds to a tumor antigen.

[0177] In some embodiments of any of the aspects, the polypeptide further comprises a leading peptide located N-terminal to the extracellular binding domain.

[0178] In some embodiments of any of the aspects, the leading peptide is a CD8alpha leading peptide.

[0179] In some embodiments of any of the aspects, the polypeptide further comprises a spacer domain located between the extracellular binding domain and the transmembrane domain.

[0180] In some embodiments of any of the aspects, the spacer domain comprises a CD8 hinge domain.

[0181] In some embodiments of any of the aspects, the polypeptide further comprises a detectable marker adjacent to and C terminal of the extracellular binding domain.

[0182] In some embodiments of any of the aspects, the detectable marker is selected from GFP, V5, HA1, Myc, VSV-G, HSV, FLAG, HIS, and biotin.

[0183] In some embodiments of any of the aspects, the polypeptide comprises residues 1-626 of SEQ ID NO: 90, residues 1-668 of SEQ ID NO: 91, residues 1-630 of SEQ ID NO: 92, residues 1-672 of SEQ ID NO: 93, residues 1-626 of SEQ ID NO: 127, residues 1-630 of SEQ ID NO: 128, or a sequence that is at least 70% identical to residues 1-626 of SEQ ID NO: 90, residues 1-668 of SEQ ID NO: 91, residues 1-630 of SEQ ID NO: 92, residues 1-672 of SEQ ID NO: 93, residues 1-626 of SEQ ID NO: 127, or residues 1-630 of SEQ ID NO: 128, that maintains the same function.

[0184] In one aspect described herein is a polypeptide comprising: (a) a repressible protease; and (b) at least one intracellular signaling domain.

[0185] In some embodiments of any of the aspects, the repressible protease is hepatitis C virus (HCV) nonstructural protein 3 (NS3).

[0186] In some embodiments of any of the aspects, the NS3 is catalytically dead.

[0187] In some embodiments of any of the aspects, the polypeptide does not comprise any protease cleavage sites.

[0188] In some embodiments of any of the aspects, the polypeptide further comprises a cofactor for the repressible protease.

[0189] In some embodiments of any of the aspects, the cofactor is an HSV NS4A domain.

[0190] In some embodiments of any of the aspects, the HSV NS4A domain is adjacent and N-terminal to the repressible protease.

[0191] In some embodiments of any of the aspects, the polypeptide is in combination with a protease inhibitor bound to the repressible protease.

[0192] In some embodiments of any of the aspects, the protease inhibitor is selected from grazoprevir (GZV), danoprevir, simeprevir, asunaprevir, ciluprevir, boceprevir, sovaprevir, paritaprevir, ombitasvir, paritaprevir, ritonavir, dasabuvir, and telaprevir.

[0193] In some embodiments of any of the aspects, the polypeptide comprises from the N-terminus to the C-terminus: (a) an extracellular domain; (b) a transmembrane domain; (c) at least one intracellular signaling domain; (d) a repressible protease; and (e) at least one intracellular signaling domain.

[0194] In some embodiments of any of the aspects, the polypeptide comprises from the N-terminus to the C-terminus: (a) an extracellular domain; (c) a transmembrane domain; (d) a first intracellular signaling domain; (e) a repressible protease; and (f) a second intracellular signaling domain.

[0195] In some embodiments of any of the aspects, the polypeptide further comprises an extracellular domain and a transmembrane domain.

[0196] In some embodiments of any of the aspects, the extracellular domain comprises the extracellular domain of DAP10.

[0197] In some embodiments of any of the aspects, the transmembrane domain comprises the transmembrane domain of CD8.

[0198] In some embodiments of any of the aspects, each of the at least one intracellular signaling domains independently comprises an intracellular signaling domain selected from the group consisting of: TCRC; FcRy; FcRp; CD3zeta; CD3y; CD35; CD3s; CD3C; CD22; CD79a; CD79b; CD66d; CARD11; CD2; CD7; CD27; CD28; CD30; CD40; CD54 (ICAM); CD83; CD134 (OX40); CD137 (4-1BB); CD150 (SLAMF1); CD152 (CTLA4); CD223 (LAG3); CD270 (HVEM); CD273 (PD-L2); CD274 (PD-Ll); CD278 (ICOS); DAP10; LAT; KD2C SLP76; TRIM; ZAP70; and 41BB.

[0199] In some embodiments of any of the aspects, the intracellular signaling domain is the intracellular signaling domain of 4-1BB and/or CD3zeta.

[0200] In some embodiments of any of the aspects, the polypeptide further comprise at least one detectable marker at the C-terminal end of the polypeptide.

[0201] In some embodiments of any of the aspects, the detectable marker is selected from GFP, V5, HA1, Myc, VSV-G, HSV, FLAG, HIS, AU1, mCherry, and biotin.

[0202] In some embodiments of any of the aspects, the polypeptide comprises one of SEQ ID NO: 86-89 or residues 648-1313 of SEQ ID NO: 90, residues 690-1355 of SEQ ID NO: 91, residues 652-1317 of SEQ ID NO: 92, residues 694-1359 of SEQ ID NO: 93, residues 648-1303 of SEQ ID NO: 127, or residues 652-1307 of SEQ ID NO: 128, or a sequence that is at least 70% identical to one of SEQ ID NO: 86-89 or residues 648-1313 of SEQ ID NO: 90, residues 690-1355 of SEQ ID NO: 91, residues 652-1317 of SEQ ID NO: 92, residues 694-1359 of SEQ ID NO: 93, residues 648-1303 of SEQ ID NO: 127, or residues 652-1307 of SEQ ID NO: 128 that maintains the same function.

[0203] In one aspect described herein is a system comprising a first polypeptide (e.g., a first reader CAR polypeptide as described herein) and a second polypeptide (e.g., a second reader CAR polypeptide as described herein).

[0204] In one aspect described herein is a system comprising: (a) a first polypeptide comprising: (i) an extracellular binding domain; (ii) a transmembrane domain; and (c) a reader domain; and (b) a second polypeptide comprising: (i) a repressible protease; and (ii) at least one intracellular signaling domain.

[0205] In some embodiments of any of the aspects, the system is in combination with a protease inhibitor bound to the repressible protease of the second polypeptide.

[0206] In some embodiments of any of the aspects, the protease inhibitor is selected from grazoprevir (GZV), danoprevir, simeprevir, asunaprevir, ciluprevir, boceprevir, sovaprevir, paritaprevir, ombitasvir, paritaprevir, ritonavir, dasabuvir, and telaprevir.

[0207] In some embodiments of any of the aspects, the reader domain of the first polypeptide specifically binds to the repressible protease of the second polypeptide in the presence of a protease inhibitor; and/or the reader domain of the first polypeptide does not specifically bind to the repressible protease of the second polypeptide in the absence of the protease inhibitor specific to the reader domain.

[0208] In some embodiments of any of the aspects, the first polypeptide comprises a co-stimulatory signaling domain.

[0209] In some embodiments of any of the aspects, the co-stimulatory signaling domain comprises the co-stimulatory signaling domain of CD28 and/or 4-1BB.

[0210] In some embodiments of any of the aspects, the second polypeptide comprises a signaling domain.

[0211] In some embodiments of any of the aspects, the signaling domain comprises the signaling domain of CD3zeta.

[0212] In some embodiments of any of the aspects, the first polypeptide and second polypeptide are physically linked to one another.

[0213] In some embodiments of any of the aspects, the first polypeptide and second polypeptide flank a self-cleaving peptide domain.

[0214] In some embodiments of any of the aspects, the polypeptide comprises SEQ ID NOs: 89-93 or 127-128 or a sequence that is at least 70% identical to SEQ ID NOs: 89-93 or 127-128 that maintains the same function.

[0215] In one aspect described herein is a polynucleotide encoding a polypeptide or system a described herein.

[0216] In some embodiments of any of the aspects, the polynucleotide comprises one of SEQ ID NOs: 1-6, 60-69, 106-113, 125-126, or a sequence that is at least 70% identical to one of SEQ ID NOs: 1-6, 60-69, 106-113, 125-126 that maintains the same function.

[0217] In one aspect described herein is a vector comprising a polynucleotide as described herein.

[0218] In some embodiments of any of the aspects, the vector comprises one of SEQ ID NOs: 236-261 or a sequence that is at least 70% identical to one of SEQ ID NOs: 236-261 that maintains the same function.

[0219] In one aspect described herein is a cell or population thereof comprising a polypeptide or system as described herein, a polynucleotide as described herein, or a vector as described herein.

[0220] In some embodiments of any of the aspects, the cell comprises an immune cell.

[0221] In some embodiments of any of the aspects, the immune cell comprises a CD4+ T cell, a CD8+ T cell, a regulatory T cell (Treg), or a natural killer (NK) cell.

[0222] In some embodiments of any of the aspects, the cell is a CD4+ T cell comprising a polypeptide as described herein.

[0223] In some embodiments of any of the aspects, the cell is a CD8+ T cell comprising a polypeptide as described herein.

[0224] In some embodiments of any of the aspects, the cell is a Treg comprising a polypeptide as described herein.

[0225] In some embodiments of any of the aspects, the cell is an NK cell comprising a polypeptide as described herein.

[0226] In some embodiments of any of the aspects, the cell further comprises an inactivating modification of at least one HLA Class I gene in the cell.

[0227] In one aspect described herein is a pharmaceutical composition comprising a polypeptide or system as described herein, a polynucleotide as described herein, a vector as described herein, or a cell as described herein, and a pharmaceutically acceptable carrier.

[0228] In one aspect described herein is a method of decreasing the degradation of a polypeptide, comprising the steps of: (a) providing a population of cells comprising a polypeptide as described herein (e.g., an ON-switch CAR polypeptide as described herein); and (b) contacting the population of cells with an effective amount of a protease inhibitor.

[0229] In some embodiments of any of the aspects, the degradation is decreased by at least 10%, at least 20%, at least 30%, at least 40%, at least 50%, at least 60%, at least 70%, at least 80%, at least 90%, at least 100%, at least 200%, at least 300%, at least 400%, or at least 500% compared to prior to contacting with the protease inhibitor.

[0230] In some embodiments of any of the aspects, the decrease in degradation results in an increase of activity of the polypeptide of at least 10%, at least 20%, at least 30%, at least 40%, at least 50%, at least 60%, at least 70%, at least 80%, at least 90%, at least 100%, at least 200%, at least 300%, at least 400%, or at least 500% compared to prior to contacting with the protease inhibitor.

[0231] In some embodiments of any of the aspects, the increase of activity of the polypeptide comprises an increase in intracellular signaling of the intracellular signaling domains of the polypeptide.

[0232] In some embodiments of any of the aspects, the increase in intracellular signaling results in an increase of activation of the population of cells.

[0233] In some embodiments of any of the aspects, the activation of the population of cells comprises expression of activation markers comprising CD69 and/or expression of cytokines comprising IL-2 and IFNg.

[0234] In some embodiments of any of the aspects, an increase of activation of the population of cells results in an increased killing efficiency of a target cell.

[0235] In some embodiments of any of the aspects, the population of cells comprises immune cells.

[0236] In some embodiments of any of the aspects, the population of immune cells comprises CD4+ T cells, CD8+ T cells, Tregs, or NK cells.

[0237] In some embodiments of any of the aspects, the target cell expresses an antigen that binds to the extracellular binding domain of the polypeptide.

[0238] In one aspect described herein is a method of treating a subject in need of a cell-based therapy comprising the steps of: (a) administering to the subject a population of cells comprising a polypeptide as described herein (e.g., an ON-switch CAR polypeptide as described herein); and (b) administering to the subject an effective amount of a protease inhibitor.

[0239] In some embodiments of any of the aspects, the protease inhibitor is administered at the same time the population of cells is administered.

[0240] In some embodiments of any of the aspects, the protease inhibitor is administered after the population of cells is administered.

[0241] In some embodiments of any of the aspects, a withdrawal or decrease in concentration of the protease inhibitor results in increased degradation of the polypeptide.

[0242] In some embodiments of any of the aspects, a withdrawal or decrease in concentration of the protease inhibitor results in decreased activity of the polypeptide.

[0243] In some embodiments of any of the aspects, the subject has a cancer expressing an antigen that binds to the extracellular binding domain of the polypeptide.

[0244] In one aspect described herein is a method of decreasing the degradation of a polypeptide, comprising the steps of: (a) providing a population of cells comprising a polypeptide or system as described herein (e.g., an AND-gate CAR polypeptide system); and (b) contacting the population of cells with an effective amount of a protease inhibitor and/or an effective amount of a degron stabilizer.

[0245] In some embodiments of any of the aspects, the degron is DHFR degron and the degron stabilizer is trimethoprim (TMP) or an analog thereof.

[0246] In some embodiments of any of the aspects, the degradation is decreased by at least 10%, at least 20%, at least 30%, at least 40%, at least 50%, at least 60%, at least 70%, at least 80%, at least 90%, at least 100%, at least 200%, at least 300%, at least 400%, or at least 500% compared to prior to contacting with the protease inhibitor and/or degron stabilizer.

[0247] In some embodiments of any of the aspects, the decrease in degradation results in an increase of activity of the polypeptide of at least 10%, at least 20%, at least 30%, at least 40%, at least 50%, at least 60%, at least 70%, at least 80%, at least 90%, at least 100%, at least 200%, at least 300%, at least 400%, or at least 500% compared to prior to contacting with the protease inhibitor and/or degron stabilizer.

[0248] In some embodiments of any of the aspects, the increase of activity of the polypeptide comprises an increase in intracellular signaling of the intracellular signaling domains of the polypeptide.

[0249] In some embodiments of any of the aspects, the increase in intracellular signaling results in an increase of activation of the population of cells.

[0250] In some embodiments of any of the aspects, the activation of the population of cells comprises expression of activation markers comprising CD69 and/or expression of cytokines comprising IL-2 and IFNg.

[0251] In some embodiments of any of the aspects, an increase of activation of the population of cells results in an increased killing efficiency of a target cell.

[0252] In some embodiments of any of the aspects, the population of cells comprises immune cells.

[0253] In some embodiments of any of the aspects, the population of immune cells comprises CD4+ T cells, CD8+ T cells, Tregs, or NK cells.

[0254] In some embodiments of any of the aspects, the target cell expresses an antigen that binds to the extracellular binding domain of the first polypeptide of the system and an antigen that binds to the extracellular binding domain of the second polypeptide of the system.

[0255] In one aspect described herein is a method of treating a subject in need of a cell-based therapy comprising the steps of: (a) administering to the subject a population of cells comprising a polypeptide or system as described herein (e.g., an AND-gate CAR polypeptide system); and (b) administering to the subject an effective amount of a protease inhibitor and/or an effective amount of a degron stabilizer.

[0256] In some embodiments of any of the aspects, the degron is DHFR degron and the degron stabilizer is trimethoprim (TMP) or an analog thereof.

[0257] In some embodiments of any of the aspects, the protease inhibitor and/or degron stabilizer is administered at the same time the population of cells is administered.

[0258] In some embodiments of any of the aspects, the protease inhibitor and/or degron stabilizer is administered after the population of cells is administered.

[0259] In some embodiments of any of the aspects, a withdrawal or decrease in concentration of the protease inhibitor and/or degron stabilizer results in increased degradation of the polypeptide.

[0260] In some embodiments of any of the aspects, a withdrawal or decrease in concentration of the protease inhibitor and/or degron stabilizer results in decreased activity of the polypeptide.

[0261] In some embodiments of any of the aspects, the subject has a cancer expressing an antigen that binds to the extracellular binding domain of the first polypeptide of the system and an antigen that binds to the extracellular binding domain of the second polypeptide of the system.

[0262] In one aspect described herein is a method of modulating the degradation of a polypeptide system, comprising the steps of: (a) providing a population of cells comprising a polypeptide or system as described herein (e.g., an AND-gate CAR polypeptide system); (b) contacting the population of cells with an effective amount of a protease inhibitor to decrease the degradation of the polypeptide system; and (c) contacting the population of cells with an effective amount of a degron destabilizer to increase the degradation of the polypeptide system.

[0263] In some embodiments of any of the aspects, the degron is a ligand-induced degradation (LID) domain and the degron destabilizer is Shield-1 or an analog thereof.

[0264] In some embodiments of any of the aspects, the degradation is decreased by at least 10%, at least 20%, at least 30%, at least 40%, at least 50%, at least 60%, at least 70%, at least 80%, at least 90%, at least 100%, at least 200%, at least 300%, at least 400%, or at least 500% compared to prior to contacting with the protease inhibitor.

[0265] In some embodiments of any of the aspects, the decrease in degradation results in an increase of activity of the polypeptide of at least 10%, at least 20%, at least 30%, at least 40%, at least 50%, at least 60%, at least 70%, at least 80%, at least 90%, at least 100%, at least 200%, at least 300%, at least 400%, or at least 500% compared to prior to contacting with the protease inhibitor.

[0266] In some embodiments of any of the aspects, the increase of activity of the polypeptide comprises an increase in intracellular signaling of the intracellular signaling domains of the polypeptide.

[0267] In some embodiments of any of the aspects, the increase in intracellular signaling results in an increase of activation of the population of cells.

[0268] In some embodiments of any of the aspects, the activation of the population of cells comprises expression of activation markers comprising CD69 and/or expression of cytokines comprising IL-2 and IFNg.

[0269] In some embodiments of any of the aspects, an increase of activation of the population of cells results in an increased killing efficiency of a target cell.

[0270] In some embodiments of any of the aspects, the degradation is increased by at least 10%, at least 20%, at least 30%, at least 40%, at least 50%, at least 60%, at least 70%, at least 80%, at least 90%, at least 100%, at least 200%, at least 300%, at least 400%, or at least 500% compared to prior to contacting with the degron destabilizer.

[0271] In some embodiments of any of the aspects, the increase in degradation results in a decrease of activity of the polypeptide of at least 10%, at least 20%, at least 30%, at least 40%, at least 50%, at least 60%, at least 70%, at least 80%, at least 90%, at least 100%, at least 200%, at least 300%, at least 400%, or at least 500% compared to prior to contacting with the degron destabilizer.

[0272] In some embodiments of any of the aspects, the decrease of activity of the polypeptide system comprises a decrease in intracellular signaling of the intracellular signaling domains of the polypeptide system.

[0273] In some embodiments of any of the aspects, the decrease in intracellular signaling results in a decrease of activation of the population of cells.

[0274] In some embodiments of any of the aspects, the activation of the population of cells comprises expression of activation markers comprising CD69 and/or expression of cytokines comprising IL-2 and IFNg.

[0275] In some embodiments of any of the aspects, a decrease of activation of the population of cells results in a decreased killing efficiency of a target cell.

[0276] In some embodiments of any of the aspects, the population of cells comprises immune cells.

[0277] In some embodiments of any of the aspects, the population of immune cells comprises CD4+ T cells, CD8+ T cells, Tregs, or NK cells.

[0278] In some embodiments of any of the aspects, the target cell expresses an antigen that binds to the extracellular binding domain of the first polypeptide of the system and an antigen that binds to the extracellular binding domain of the second polypeptide of the system.

[0279] In one aspect described herein is a method of treating a subject in need of a cell-based therapy comprising the steps of: (a) administering to the subject a population of cells comprising a polypeptide or system as described herein (e.g., an AND-gate CAR polypeptide system); (b) administering to the subject an effective amount of a protease inhibitor; and (c) administering to the subject an effective amount of a degron destabilizer.

[0280] In some embodiments of any of the aspects, the degron is a ligand-induced degradation (LID) domain and the degron destabilizer is Shield-1 or an analog thereof.

[0281] In some embodiments of any of the aspects, the protease inhibitor is administered at the same time the population of cells is administered.

[0282] In some embodiments of any of the aspects, the protease inhibitor is administered after the population of cells is administered.

[0283] In some embodiments of any of the aspects, the degron destabilizer is administered after the population of cells is administered.

[0284] In some embodiments of any of the aspects, an increase in concentration of the protease inhibitor results in increased activity of the polypeptide system.

[0285] In some embodiments of any of the aspects, an increase in concentration of the degron destabilizer results in decreased activity of the polypeptide system.

[0286] In some embodiments of any of the aspects, the subject has a cancer expressing an antigen that binds to the extracellular binding domain of the first polypeptide of the system and an antigen that binds to the extracellular binding domain of the second polypeptide of the system.

[0287] In one aspect described herein is a method of decreasing the activity of a polypeptide system, comprising the steps of: (a) providing a population of cells comprising a polypeptide or system as described herein (e.g., an OFF-switch CAR polypeptide system); and (b) contacting the population of cells with an effective amount of a protease inhibitor.

[0288] In some embodiments of any of the aspects, the activity is decreased by at least 10%, at least 20%, at least 30%, at least 40%, at least 50%, at least 60%, at least 70%, at least 80%, at least 90%, at least 100%, at least 200%, at least 300%, at least 400%, or at least 500% compared to prior to contacting with the protease inhibitor.

[0289] In some embodiments of any of the aspects, the decrease of activity of the polypeptide system comprises a decrease in intracellular signaling of the intracellular signaling domains of the polypeptide system.

[0290] In some embodiments of any of the aspects, the decrease in intracellular signaling results in a decrease of activation of the population of cells.

[0291] In some embodiments of any of the aspects, the activation of the population of cells comprises expression of activation markers comprising CD69 and/or expression of cytokines comprising IL-2 and IFNg.

[0292] In some embodiments of any of the aspects, a decrease of activation of the population of cells results in a decreased killing efficiency of a target cell.

[0293] In some embodiments of any of the aspects, the population of cells comprises immune cells.

[0294] In some embodiments of any of the aspects, the population of immune cells comprises CD4+ T cells, CD8+ T cells, Tregs, or NK cells.

[0295] In some embodiments of any of the aspects, the target cell expresses an antigen that binds to the extracellular binding domain of the first polypeptide of the system.

[0296] In one aspect described herein is a method of treating a subject in need of a cell-based therapy comprising the steps of: (a) administering to the subject a population of cells comprising a polypeptide or system as described herein (e.g., an OFF-switch CAR polypeptide system); and (b) administering to the subject an effective amount of a protease inhibitor.

[0297] In some embodiments of any of the aspects, the protease inhibitor is administered at the same time the population of cells is administered.

[0298] In some embodiments of any of the aspects, the protease inhibitor is administered after the population of cells is administered.

[0299] In some embodiments of any of the aspects, an increase in concentration of the protease inhibitor results in decreased activity of the polypeptide system.

[0300] In some embodiments of any of the aspects, the subject has a cancer expressing an antigen that binds to the extracellular binding domain of the polypeptide.

[0301] In one aspect described herein is a method of increasing the activity of a polypeptide system, comprising the steps of: (a) providing a population of cells comprising a polypeptide or system as described herein (e.g., a reader CAR polypeptide system); and (b) contacting the population of cells with an effective amount of a protease inhibitor.

[0302] In some embodiments of any of the aspects, the activity is increased by at least 10%, at least 20%, at least 30%, at least 40%, at least 50%, at least 60%, at least 70%, at least 80%, at least 90%, at least 100%, at least 200%, at least 300%, at least 400%, or at least 500% compared to prior to contacting with the protease inhibitor.

[0303] In some embodiments of any of the aspects, the increase of activity of the polypeptide system comprises an increase in intracellular signaling of the intracellular signaling domains of the polypeptide system.

[0304] In some embodiments of any of the aspects, the increase in intracellular signaling results in an increase of activation of the population of cells.

[0305] In some embodiments of any of the aspects, the activation of the population of cells comprises expression of activation markers comprising CD69 and/or expression of cytokines comprising IL-2 and IFNg.

[0306] In some embodiments of any of the aspects, an increase of activation of the population of cells results in an increased killing efficiency of a target cell.

[0307] In some embodiments of any of the aspects, the population of cells comprises immune cells.

[0308] In some embodiments of any of the aspects, the population of immune cells comprises CD4+ T cells, CD8+ T cells, Tregs, or NK cells.

[0309] In some embodiments of any of the aspects, the target cell expresses an antigen that binds to the extracellular binding domain of the first polypeptide of the system.

[0310] In one aspect described herein is a method of treating a subject in need of a cell-based therapy comprising the steps of: (a) administering to the subject a population of cells comprising a polypeptide or system as described herein (e.g., a reader CAR polypeptide system); and (b) administering to the subject an effective amount of a protease inhibitor.

[0311] In some embodiments of any of the aspects, the protease inhibitor is administered at the same time the population of cells is administered.

[0312] In some embodiments of any of the aspects, the protease inhibitor is administered after the population of cells is administered.

[0313] In some embodiments of any of the aspects, an increase in concentration of the protease inhibitor results in increased activity of the polypeptide system.

[0314] In some embodiments of any of the aspects, the subject has a cancer expressing an antigen that binds to the extracellular binding domain of the polypeptide.

### BRIEF DESCRIPTION OF THE DRAWINGS

[0315] FIG. 1A-1B is a series of schematics. FIG. 1A shows three versions of the NS3 CAR construct compared to traditional CAR. FIG. 1B shows the mechanism of action of the NS3 CAR.

[0316] FIG. 2A-2B is a series of bar graphs. FIG. 2A is a series of bar graphs showing CD69 expression in CD4+ and CD8+ T cells following expression of the NS3 CAR constructs or traditional CAR, in the presence or absence of GZV (Grazoprevir) and/or target cell. FIG. 2B is a series of bar graphs showing CD4+ and CD8+ T cell IL-2 and IFN-gamma cytokine release following expression the NS3 CAR constructs or traditional CAR, in the presence or absence of GZV and/or target cell.

[0317] FIG. 3A-3B is a series of graphs. FIG. 3A is a bar graph showing the killing efficiency of CD8+ T cells following expression of the NS3 CAR constructs or traditional CAR, in the presence or absence of GZV. FIG. 3B is a line graph showing that the concentration of Grazoprevir can be used to regulate the level of killing efficiency by CD8+ T cells expressing NS3 CAR (V2) but does not impact traditional CAR T cells or wild-type cells.

[0318] FIG. 4A-4C is a series of graphs showing the expression of V1 and V2 NS3s CARs in Tregs. The top panel of FIG. 4A shows Foxp3 expression in CD4+ CD25− Foxp3+ cells and CD4+ CD25+ CD127low Foxp3+ Tregs. The bottom panel of FIG. 4A is a series of flow cytometry histograms showing the expression of NS3 CARs in CD4+ CD25+ CD127low Foxp3+ Tregs compared to WT cells. FIG. 4B is a series of flow cytometry histograms showing CD69 expression in WT Tregs (solid lines) or Tregs expressing the indicated CAR construct (dashed lines) without GZV (left graphs) or with 1 uM GZV (right graphs). The bar graph of FIG. 4B shows CD69 expression in WT Tregs or Tregs expressing NS3 CAR constructs or traditional CAR without GZV (dark grey) or with 1 uM GZV (light grey). FIG. 4C is a schematic and a series of flow cytometry histograms showing CD4+ T cell proliferation induced by T regs expressing NS3 CAR constructs or traditional CAR with or without 1 uM GZV.

[0319] FIG. 5A-5C is a series of graphs showing NS3 CAR expression in natural killer (NK) cells. FIG. 5A is a bar graph showing the killing efficiency of NK cells expressing NS3 CARs or traditional CAR with or without GZV. FIG. 5B is a series of flow cytometry histograms showing the levels of NS3 CAR or traditional CAR expression in natural killer (NK) cells. FIG. 5C is a series of bar graphs showing the level of IFN-gamma release in NK cells expressing NS3 CARs or traditional CAR with or without GZV.

[0320] FIG. 6A-6C is a series of graphs showing the AND gate CAR construct. FIG. 6A has a schematic showing the structure of the AND gate CAR construct. FIG. 6A also shows a series of flow cytometry dot plots showing the expression of ScFv1 and ScFv2 of the AND gate CAR construct on CD4+ or CD8+ T cells in the presence or absence of trimethoprim (TMP) and/or GZV. FIG. 6B is a series of bar graphs showing the expression of CD69, IFN, and IL-2 in CD4+ T cells expressing the AND gate construct in the presence or absence of trimethoprim (TMP) and/or GZV; the heat maps show the effect of varying the amount of trimethoprim (TMP) and/or GZV on the expression of CD69, IFN, and IL-2 in CD4+ T cells expressing the AND gate construct. FIG. 6C is a bar graph showing the percentage of remaining viable (target) cells of CD8+ T cells expressing the AND gate construct in the presence or absence of trimethoprim (TMP) and/or GZV.

[0321] FIG. 7 is a flow cytometry dot plot showing the expression of the NS3 CAR and B2M in WT CD4+ T cells or B2M knockout CD4+ T cells.

[0322] FIG. 8A-8D is a series of schematics and graphs showing testing of variations of the NS3 OFF CAR in Jurkat T cells. FIG. 8A shows a schematic for how the NS3 OFF CAR functions. FIG. 8B shows various designs tested for the first and second components that make up the NS3 OFF CAR. Combinations of components were tested as indicated. Each was introduced on a separate vector. FIG. 8C shows NFAT activity of Jurkat cells expressing different versions of the OFF CAR in the presence and absence of grazoprevir. FIG. 8D shows levels of T cell activation marker CD69 in Jurkat cells expressing the variations of the OFF CAR.

[0323] FIG. 9A-9C is a series of schematics and graphs showing testing of NS3 OFF switch CAR in Jurkat T cells with components introduced in a single vector. FIG. 9A is a diagram of how the components are located on the single vector. FIG. 9B is a bar graph showing NFAT levels of Jurkat cells expressing the OFF CAR. FIG. 9C is a bar graph showing CD69 activation marker levels for Jurkat cells expressing different versions of the OFF CAR.

[0324] FIG. 10A-10D is a series of schematics and graphs showing testing of NS3 OFF switch CAR in primary T cells (PBMC) with components introduced in a single vector. FIG. 10A is a diagram of how the components are located on the single vector. FIG. 10B is a bar graph showing cytotoxicity of T cells expressing the OFF CAR. FIG. 10C-10D are bar graphs showing cytokine levels released by primary T cells expressing the different versions of the OFF CAR. FIG. 10C shows IFN levels, and FIG. 10D shows IL-2 levels.

[0325] FIG. 11A-11C is a series of schematics and graphs showing testing of NS3 Reader CARs in Jurkat T cells. FIG. 11A is a diagram of how the components are located on the single vector. FIG. 11B is a bar graph showing NFAT activity of Jurkat cells expressing reader CARs comprising the NS31a genotype. FIG. 11C is a bar graph showing NFAT activity of Jurkat cells expressing reader CARs comprising the NS31b genotype. For FIG. 11B-11C, danoprevir is indicated in light grey, and grazoprevir is indicated in dark grey.

[0326] FIG. 12A-12C is a series of schematics and graphs showing the design and function of the NS3 reader CARs in Jurkat T cells. FIG. 12A shows a schematic for how the DNCR and GNCR reader CARs function. FIG. 12B is a schematic and series of graphs showing the functionality of Jurkat T cells expressing the reader CARs. The reader CAR versions tested in FIG. 12B included CD28 in the first component and 4-1BB in the second component. FIG. 12C is a schematic and series of graphs showing additional versions of the reader CARs tested, which included both CD28 and 4-1BB in the first component, and 4-1BB again in the second component. In the top panel flow cytometry plots of FIGS. 12B and 12C, the dark grey curve indicates WT cells, and the light grey curve indicates cells transduced with the indicated CAR construct. In the bottom panel bar graphs of FIGS. 12B and 12C, the light grey bar indicates that the highest functionality in cells expressing a DNCR CAR system occurs when contacted with danoprevir; and the dark grey bar indicates that the highest functionality in cells expressing a GNCR CAR system occurs when contacted with grazoprevir.

### DETAILED DESCRIPTION

[0327] Described herein are four general frameworks of drug-controllable CAR polypeptides and systems comprising repressible proteases: (1) drug-inducible CAR polypeptides (i.e., ON-switches); (2) drug-inducible two-component logic-switch CAR polypeptide systems (i.e., AND-gates); (3) drug-repressible CAR polypeptide systems (i.e., OFF-switches); and (4) drug-inducible reader CAR polypeptide systems that are responsive to a specific protease inhibitor (i.e., reader CARs). Also described herein are polynucleotides and vector encoding said CAR polypeptides, cells expressing said CAR polypeptides, pharmaceutical compositions comprising said CAR polypeptides, and methods of using said CAR polypeptides.

[0328] In multiple aspects described herein are polypeptides that are drug-inducible (i.e., ON-switch) or drug-repressible (i.e., OFF-switch) chimeric antigen receptors (CARs, also known as chimeric immunoreceptors). CARs are receptor proteins that have been engineered to give cells, such as T cells, the ability to target a specific protein. The receptors are chimeric because they combine both antigen-binding and immune cell activating functions into a single receptor.

[0329] T cells naturally express T-cell receptor (TCR) and a variety of co-stimulatory receptors and signaling molecules. The TCR is responsible for recognizing fragments of antigen as peptides bound to major histocompatibility complex (MHC) molecules. In humans, in 95% of T cells the TCR consists of an alpha (a) chain and a beta (13) chain (encoded by TRA and TRB, respectively), whereas in 5% of T cells the TCR consists of gamma and delta (γ/δ) chains (encoded by TRG and TRD, respectively). The T cell receptor exists as a complex of several proteins. The actual T cell receptor is composed of two separate peptide chains (e.g., TCRα and TCRβ). The other proteins in the complex are the CD3 proteins: CD3εγ and CD3εδ heterodimers and, most important, a CD3ζ homodimer, which has a total of six immunoreceptor tyrosine-based activation motif (ITAM) motifs.

[0330] Activation of CD4+ T cells occurs through the simultaneous engagement of the T-cell receptor and a co-stimulatory molecule (e.g., CD28, or ICOS) on the T cell by the major histocompatibility complex (MHCII) peptide and co-stimulatory molecules on the antigen presenting cell (APC). Intracellular signalling through the ITAM motifs of CD3ζ result in T cell activation, cytokine secretion, and target cell killing (in the case of CD8+ T cells). Markers of T cell activation include CD69, CD71 and CD25 (also a marker for Treg cells), and HLA-DR (a marker of human T cell activation).

[0331] CARs combine components or functions of the TCR and associated molecules into one polypeptide. In some embodiments of any of the aspects, the polypeptide described herein is a first generation CAR, which comprises an extracellular binding domain, a hinge region, a transmembrane domain, and one or more intracellular signaling domains. The extracellular binding domain typically contains a single-chain variable fragment (scFv) derived from tumor antigen-reactive antibodies that usually has a high specificity to a specific tumor antigen. All CARs contain the CD3ζ chain domain as the intracellular signaling domain, which is the primary transmitter of T cell activation signals. In addition to scFvs, non-antibody-based approaches have also been used to direct CAR specificity, usually taking advantage of ligand/receptor pairs that normally bind to each other. In some embodiments of any of the aspects, the polypeptide described herein can comprise cytokines, innate immune receptors, TNF receptors, growth factors, and structural proteins, which have all been successfully used as CAR antigen recognition domains.

[0332] The hinge, also called a spacer, is a small structural domain that sits between the antigen recognition region and the cell's outer membrane. An ideal hinge enhances the flexibility of the scFv receptor head, reducing the spatial constraints between the CAR and its target antigen. This promotes antigen binding and synapse formation between the CAR-T cells and target cells. In some embodiments of any of the aspects, the hinge sequence of the polypeptide described herein comprises the membrane-proximal regions from other immune molecules including IgG, CD8, and CD28.

[0333] The transmembrane domain is a structural component, consisting of a hydrophobic alpha helix that spans the cell membrane. It anchors the CAR to the plasma membrane, bridging the extracellular hinge and antigen recognition domains with the intracellular signaling region. This domain is essential for the stability of the receptor as a whole. Generally, the transmembrane domain from the most membrane-proximal component of the endodomain is used, but different transmembrane domains result in different receptor stability. The CD28 transmembrane domain is known to result in a highly expressed, stable receptor. Accordingly, in some embodiments of any of the aspects, the polypeptide as described herein comprises the transmembrane domain of CD28. Using the CD3-zeta transmembrane domain is not recommended, as it can result in incorporation of the artificial TCR into the native TCR.

[0334] The intracellular T-cell signaling domain lies in the receptor's endodomain, inside the cell. After an antigen is bound to the external antigen recognition domain, CAR receptors cluster together and transmit an activation signal. Then the internal cytoplasmic end of the receptor perpetuates signaling inside the T cell. Normal T cell activation relies on the phosphorylation of immunoreceptor tyrosine-based activation motifs (ITAMs) present in the cytoplasmic domain of CD3-zeta. To mimic this process, CD3-zeta's cytoplasmic domain is commonly used as the main CAR endodomain component. In some embodiments of any of the aspects, any ITAM-containing domains can be used in the polypeptide as described herein.

[0335] T cells also require co-stimulatory molecules in addition to CD3 signaling in order to persist after activation. For this reason, the endodomains of CAR receptors typically also include one or more chimeric domains from co-stimulatory proteins. In some embodiments of any of the aspects, signaling domains from a wide variety of co-stimulatory molecules can be used in the polypeptide as described herein, including CD28, CD27, CD134 (OX40), and CD137 (4-1BB).

[0336] In some embodiments of any of the aspects, the polypeptide as described herein is a second generation CARs, which further comprises a co-stimulatory domain, like CD28 or 4-1BB. The involvement of these intracellular signaling domains improve T cell proliferation, cytokine secretion, resistance to apoptosis, and in vivo persistence.

[0337] In some embodiments of any of the aspects, the polypeptide as described herein is a third generation CAR, which combines multiple co-stimulatory domains, such as CD28-41BB or CD28-OX40, to augment T cell activity. Preclinical data show the third-generation CARs exhibit improved effector functions and better in vivo persistence as compared to second-generation CARs; see e.g., Hartmann et al (2017). “Clinical development of CAR T cells-challenges and opportunities in translating innovative treatment concepts”. EMBO Molecular Medicine. 9 (9): 1183-1197; which is incorporated by reference herein in its entirety.

[0338] In some embodiments of any of the aspects, the polypeptide as described herein is a fourth generation CAR (also known as TRUCKs or armored CARs), which further comprises factors that enhance T cell expansion, persistence, and anti-tumoral activity. In some embodiments of any of the aspects, a CAR polypeptide as described herein is a fourth generation CAR, which comprises cytokines, such is IL-2, IL-5, IL-12 and co-stimulatory ligands; see e.g., Chmielewski M, Abken H (2015). “TRUCKs: the fourth generation of CARs”. Expert Opinion on Biological Therapy. 15 (8): 1145-1154; which is incorporated by reference herein in its entirety.

[0339] CAR-T cell therapy uses T cells engineered with CARs for cancer therapy. The premise of CAR-T immunotherapy is to modify T cells to recognize cancer cells in order to more effectively target and destroy them. T cells are harvested from people, genetically altered, then the resulting CAR-T cells are infused into patients to attack their tumors. CAR-T cells can be either derived from T cells in a patient's own blood (autologous) or derived from the T cells of another healthy donor (allogeneic). Once isolated from a person, these T cells are genetically engineered to express a specific CAR, which programs them to target an antigen that is present on the surface of tumors. For safety, CAR-T cells are engineered to be specific to an antigen expressed on a tumor that is not expressed on healthy cells.

[0340] There are several challenges of current CAR T cell therapies, such as: the inability to control the rate of cytokine release and tumor lysis; the absence of an off switch that would terminate cytotoxic activity when tumor eradication is complete; auto-activation; T-cell fratricide; and a requirement to generate a different CAR T cell for each unique tumor antigen may be solved or mitigated using the adaptor approach. Cytokine release syndrome (CRS) is a major side effect associated with CAR treatments. Cytokine release syndrome is caused by a large, rapid release of cytokines (e.g., IL-6, TNFa, and IFNg) into the blood from immune cells affected by the immunotherapy. Signs and symptoms of cytokine release syndrome include fever, nausea, headache, rash, rapid heartbeat, low blood pressure, and trouble breathing. Most patients have a mild reaction, but sometimes, the reaction may be severe or life threatening. Another potentially severe side effect of CAR-T therapy is tumor lysis syndrome, which is the sudden release of cellular contents into the bloodstream following tumor cell lysis. Several strategies have been employed to allow the precise control of CAR expression or activity. These major control techniques trigger T cell death or limit T cell activation, and often regulate the T cells via a separate drug that can be introduced or withheld as needed.

[0341] A desirable method to control CAR activity is through CARs that are drug-inducible (i.e., “ON switch”) or drug-repressible (“i.e., OFF switch). Administration of a drug can thus modulate CAR activity and reduce the occurrence of side effects. Current ON- or OFF-switch CARs use protein-based inducers, which are difficult to administer, or small-molecule inducers with poor pharmacokinetics. In several aspects described herein are CARs comprising a repressible protease whose activity can be modulated in the presence of a specific protease inhibitor. The repressible protease of the present disclosure is thus advantageous and clinically applicable compared to other ON-switch and OFF-switch CAR systems.

[0342] Another approach to reducing side effects of CAR therapy includes expressing the CAR domains as a system of multiple, separate polypeptides. In some embodiments of any of the aspects, the CAR domains are comprised by at least 2, at least 3, at least 4, or at least 5 separate polypeptides. In some embodiments of any of the aspects, the CAR domains are comprised by two separate polypeptides. Such an approach can also be referred to as a “bi-component CAR”, “multi-component CAR”, a “CAR polypeptide system” or a “CAR system” in which both (or all) polypeptides are required in order for the system to function. In some embodiments of any of the aspects, a “CAR system” refers to a CAR comprising at least two separate polypeptides, neither of which polypeptides is capable of both ligand recognition and signaling activation on its own. In several aspects described herein are systems comprising multiple CAR polypeptides.

[0343] Further discussion of CARs can be found, e.g., in Maus et al. Blood 2014 123:2624-35; Reardon et al. Neuro-Oncology 2014 16:1441-1458; Hoyos et al. Haematologica 2012 97:1622; Byrd et al. J Clin Oncol 2014 32:3039-47; Maher et al. Cancer Res 2009 69:4559-4562; and Tamada et al. Clin Cancer Res 2012 18:6436-6445; each of which is incorporated by reference herein in its entirety.

[0344] In multiple aspects described herein are CAR polypeptides or CAR polypeptide systems that comprise at least one of the following: repressible protease, extracellular binding domain, extracellular domain, transmembrane domain, intracellular signaling domain, detectable marker, degron domain, peptide domain, reader domain, and/or self-cleaving peptide, or any combination thereof. In some embodiments of any of the aspects, a CAR polypeptide or a CAR polypeptide system collectively (i.e., the first polypeptide and/or the second polypeptide) comprises at least the following: an extracellular domain, a transmembrane domain, and at least one intracellular signaling domain. Specific CARs described herein are not to be construed as limitations. Accordingly, in multiple aspects described herein are CAR polypeptides or CAR polypeptide systems that comprise an extracellular binding domain, a transmembrane domain, at least one intracellular signaling domain, and at least one of the following: repressible protease, extracellular domain, detectable marker, degron domain, peptide domain, reader domain, and/or self-cleaving peptide, or any combination thereof. For example, the following combinations are contemplated herein (see e.g., Table 21):

TABLE 21
Exemplary Combinations of Domains in a CAR Polypeptide
or CAR Polypeptide System (that comprises an extracellular
binding domain, a transmembrane domain, at least
one intracellular signaling domain).

| RP | ED | DM | DD | PD | RD | SP |
|---|---|---|---|---|---|---|
| X | | | | | | |
| | X | | | | | |
| X | X | | | | | |
| | | X | | | | |
| X | | X | | | | |
| | X | X | | | | |
| X | X | X | | | | |
| | | | X | | | |
| X | | | X | | | |
| | X | | X | | | |
| X | X | | X | | | |
| | | X | X | | | |
| X | | X | X | | | |
| | X | X | X | | | |
| X | X | X | X | | | |
| | | | | X | | |
| X | | | | X | | |
| | X | | | X | | |
| X | X | | | X | | |
| | | X | | X | | |
| X | | X | | X | | |
| | X | X | | X | | |
| X | X | X | | X | | |
| | | | X | X | | |
| X | | | X | X | | |
| | X | | X | X | | |
| X | X | | X | X | | |
| | | X | X | X | | |
| X | | X | X | X | | |
| | X | X | X | X | | |
| X | X | X | X | X | | |
| | | | | | X | |
| X | | | | | X | |
| | X | | | | X | |
| X | X | | | | X | |
| | | X | | | X | |
| X | | X | | | X | |
| | X | X | | | X | |
| X | X | X | | | X | |
| | | | X | | X | |
| X | | | X | | X | |
| | X | | X | | X | |
| X | X | | X | | X | |
| | | X | X | | X | |
| X | | X | X | | X | |
| | X | X | X | | X | |
| X | X | X | X | | X | |
| | | | | X | X | |
| X | | | | X | X | |
| | X | | | X | X | |
| X | X | | | X | X | |
| | | X | | X | X | |
| X | | X | | X | X | |
| | X | X | | X | X | |
| X | X | X | | X | X | |
| | | | X | X | X | |
| X | | | X | X | X | |
| | X | | X | X | X | |
| X | X | | X | X | X | |
| | | X | X | X | X | |
| X | | X | X | X | X | |
| | X | X | X | X | X | |
| X | X | X | X | X | X | |
| | | | | | | X |
| X | | | | | | X |
| | X | | | | | X |
| X | X | | | | | X |
| | | X | | | | X |
| X | | X | | | | X |
| | X | X | | | | X |
| X | X | X | | | | X |
| | | | X | | | X |
| X | | | X | | | X |
| | X | | X | | | X |
| X | X | | X | | | X |
| | | X | X | | | X |
| X | | X | X | | | X |
| | X | X | X | | | X |
| X | X | X | X | | | X |
| | | | | X | | X |
| X | | | | X | | X |
| | X | | | X | | X |
| X | X | | | X | | X |
| | | X | | X | | X |
| X | | X | | X | | X |
| | X | X | | X | | X |
| X | X | X | | X | | X |
| | | | X | X | | X |
| X | | | X | X | | X |
| | X | | X | X | | X |
| X | X | | X | X | | X |
| | | X | X | X | | X |
| X | | X | X | X | | X |
| | X | X | X | X | | X |
| X | X | X | X | X | | X |
| | | | | | X | X |
| X | | | | | X | X |
| | X | | | | X | X |
| X | X | | | | X | X |
| | | X | | | X | X |
| X | | X | | | X | X |
| | X | X | | | X | X |
| X | X | X | | | X | X |
| | | | X | | X | X |
| X | | | X | | X | X |
| | X | | X | | X | X |
| X | X | | X | | X | X |
| | | X | X | | X | X |
| X | | X | X | | X | X |
| | X | X | X | | X | X |
| X | X | X | X | | X | X |
| | | | | X | X | X |
| X | | | | X | X | X |
| | X | | | X | X | X |
| X | X | | | X | X | X |
| | | X | | X | X | X |
| X | | X | | X | X | X |
| | X | X | | X | X | X |
| X | X | X | | X | X | X |
| | | | X | X | X | X |
| X | | | X | X | X | X |
| | X | | X | X | X | X |
| X | X | | X | X | X | X |
| | | X | X | X | X | X |
| X | | X | X | X | X | X |
| | X | X | X | X | X | X |
| X | X | X | X | X | X | X |

“RP” indicates repressible protease.
“ED” indicates extracellular domain.
“DM” indicates detectable marker.
“DD” indicates degron domain.
“PD” indicates peptide domain.
“RD” indicates reader domain.
“SP” indicates self-cleaving peptide.

[0345] In some embodiments of any of the aspects, a CAR system can comprise any combination of the types of CAR polypeptide and systems as described herein. Table 12 below shows non-limiting examples of such combinations. In some embodiments of any of the aspects, the examples shown in Table 12 can be in combination with a protease inhibitor, as described herein, or bound to or specifically bound to the protease inhibitor. In some embodiments of any of the aspects, the protease inhibitor can activate specific CAR polypeptides or systems (e.g., ON-switch, AND-gate, reader). In some embodiments of any of the aspects, the protease inhibitor can inactivate specific CAR polypeptides or systems (e.g., OFF-switch, reader).

TABLE 12
CAR systems.

| ON | AND | OFF | Reader |
|---|---|---|---|
| X | | | |
| | X | | |
| | | X | |
| | | | X |
| X | X | | |
| X | | X | |
| X | | | X |
| | X | X | |
| | X | | X |
| | | X | X |
| X | X | X | |
| X | X | | X |
| X | | X | X |
| | X | X | X |
| X | X | X | X |

“ON” indicates the ON-switch (i.e., drug-inducible) CAR polypeptides as described herein.
“AND” indicates the AND-gate CAR polypeptides and systems as described herein.
“OFF” indicates the OFF-switch (i.e., drug-repressible) CAR polypeptides and systems as described herein.
“Reader” indicates the reader CAR polypeptides and systems as described herein

[0346] In some embodiments of any of the aspects, a CAR polypeptide or system can comprise a repressible protease, a degron domain, a peptide domain, a reader domain, a self-cleaving peptide, an extracellular binding domain, a transmembrane domain, at least one intracellular signaling domain, and/or a detectable marker, as described further herein.

[0347] In several aspects, described herein are CAR polypeptides comprising a repressible protease. As used herein, the term “repressible protease” refers to a protease that can be inactivated by the presence or absence of a specific agent (e.g., that specifically binds to the protease). In some embodiments, a repressible protease is active (e.g., cleaves a protease cleavage site) in the absence of the specific agent and is inactive (e.g., does not cleave a protease cleavage site) in the presence of the specific agent. In some embodiments, the specific agent is a protease inhibitor. In some embodiments, the protease inhibitor specifically inhibits a given repressible protease as described herein. As a non-limiting example, an ON-switch CAR polypeptide, an AND-gate CAR polypeptide, an OFF-switch CAR polypeptide, and/or a reader CAR polypeptide can comprise a repressible protease as described herein.

[0348] In some embodiments of any of the aspects, a CAR polypeptide as described herein (or a CAR polypeptide system collectively) comprises 1, 2, 3, 4, 5, or more repressible protease(s). In some embodiments of any of the aspects, the CAR polypeptide or system comprises one repressible protease. In embodiments comprising multiple repressible proteases, the multiple repressible proteases can be different individual repressible proteases or multiple copies of the same repressible protease, or a combination of the foregoing.

[0349] Non-limiting examples of repressible proteases include hepatitis C virus proteases (e.g., NS3 and NS2-3); signal peptidase; proprotein convertases of the subtilisin/kexin family (furin, PCI, PC2, PC4, PACE4, PC5, PC); proprotein convertases cleaving at hydrophobic residues (e.g., Leu, Phe, Val, or Met); proprotein convertases cleaving at small amino acid residues such as Ala or Thr; proopiomelanocortin converting enzyme (PCE); chromaffin granule aspartic protease (CGAP); prohormone thiol protease; carboxypeptidases (e.g., carboxypeptidase E/H, carboxypeptidase D and carboxypeptidase Z); aminopeptidases (e.g., arginine aminopeptidase, lysine aminopeptidase, aminopeptidase B); prolyl endopeptidase; aminopeptidase N; insulin degrading enzyme; calpain; high molecular weight protease; and, caspases 1, 2, 3, 4, 5, 6, 7, 8, and 9. Other proteases include, but are not limited to, aminopeptidase N; puromycin sensitive aminopeptidase; angiotensin converting enzyme; pyroglutamyl peptidase II; dipeptidyl peptidase IV; N-arginine dibasic convertase; endopeptidase 24.15; endopeptidase 24.16; amyloid precursor protein secretases alpha, beta and gamma; angiotensin converting enzyme secretase; TGF alpha secretase; T F alpha secretase; FAS ligand secretase; TNF receptor-I and -II secretases; CD30 secretase; KL1 and KL2 secretases; IL6 receptor secretase; CD43, CD44 secretase; CD 16-1 and CD 16-11 secretases; L-selectin secretase; Folate receptor secretase; MMP 1, 2, 3, 7, 8, 9, 10, 11, 12, 13, 14, and 15; urokinase plasminogen activator; tissue plasminogen activator; plasmin; thrombin; BMP-1 (procollagen C-peptidase); ADAM 1, 2, 3, 4, 5, 6, 7, 8, 9, 10, and 11; and, granzymes A, B, C, D, E, F, G, and H. For a discussion of proteases, see, e.g., V. Y. H. Hook, Proteolytic and cellular mechanisms in prohormone and proprotein processing, RG Landes Company, Austin, Tex., USA (1998); N. M. Hooper et al., Biochem. J. 321: 265-279 (1997); Z. Werb, Cell 9 1: 439-442 (1997); T. G. Wolfsberg et al., J. Cell Biol. 131: 275-278 (1995); K. Murakami and J. D. Etlinger, Biochem. Biophys. Res. Comm. 146: 1249-1259 (1987); T. Berg et al., Biochem. J. 307: 313-326 (1995); M. J. Smyth and J. A. Trapani, Immunology Today 16: 202-206 (1995); R. V. Talanian et al., J. Biol. Chem. 272: 9677-9682 (1997); and N. A. Thomberry et a, J. Biol. Chem. 272: 17907-1791 1 (1997); International Patent Application WO2019118518; the contents of each of which are incorporated herein by reference in their entireties.

[0350] In some embodiments of any of the aspects, the repressible protease is hepatitis C virus (HCV) nonstructural protein 3 (NS3). NS3, also known as p-70, is a viral nonstructural protein that is a 70 kDa cleavage product of the hepatitis C virus polyprotein. The 631-residue HCV NS3 protein is a dual-function protein, containing the trypsin/chymotrypsin-like serine protease in the N-terminal region and a helicase and nucleoside triphosphatase in the C-terminal region. The minimal sequences required for a functional serine protease activity comprise the N-terminal 180 amino acids of the NS3 protein, which can also be referred to as “NS3a”. Deletion of up to 14 residues from the N terminus of the NS3 protein is tolerated while maintaining the serine protease activity. Accordingly, the repressible proteases described herein comprise at the least residues 14-180 of the wildtype NS3 protein.

[0351] HCV has at least seven genotypes, labeled 1 through 7, which can also be further designated with “a” and “b” subtypes. Accordingly, the repressible protease can be an HCV genotype 1 NS3, an HCV genotype 1a NS3, an HCV genotype 1b NS3, an HCV genotype 2 NS3, an HCV genotype 2a NS3, an HCV genotype 2b NS3, an HCV genotype 3 NS3, an HCV genotype 3a NS3, an HCV genotype 3b NS3, an HCV genotype 4 NS3, an HCV genotype 4a NS3, an HCV genotype 4b NS3, an HCV genotype 5 NS3, an HCV genotype 5a NS3, an HCV genotype 5b NS3, an HCV genotype 6 NS3, an HCV genotype 6a NS3, an HCV genotype 6b NS3, an HCV genotype 7 NS3, an HCV genotype 7a NS3, or an HCV genotype 7b NS3. In some embodiments of any of the aspects, the repressible protease can be any known HCV NS3 genotype, variant, or mutant, e.g., that maintains the same function. In some embodiments of any of the aspects, the NS3 sequence comprises residues 1-180 of the NS3 protein from HCV-H, HCV-1, HCV-J1, HCV-BK, HCV-JK1, HCV-J4, HCV-J, HCV-J6, C14112, HCV-J8, D14114, HCV-Nz11, or HCV-K3a (see e.g., Chao Lin, Chapter 6: HCV NS3-4A Serine Protease, Hepatitis C Viruses: Genomes and Molecular Biology, Editor: Tan S L, Norfolk (UK): Horizon Bioscience, 2006; the content of which is incorporated herein by reference in its entirety). In some embodiments of any of the aspects, the repressible protease is a chimera of 2, 3, 4, 5, or more different NS3 genotypes, variants, or mutants as described herein, such that the protease maintains its cleavage and/or binding functions.

[0352] In some embodiments of any of the aspects, the repressible protease of a CAR polypeptide as described herein comprises SEQ ID NOs: 49, 129-136, 179-183 or an amino acid sequence that is at least 70%, at least 75%, at least 80%, at least 85%, at least 90%, at least 90%, at least 91%, at least 92%, at least 93%, at least 94%, at least 95%, at least 96%, at least 97%, at least 98%, or at least 99% identical to the sequence of one of SEQ ID NOs: 49, 129-136, or 179-183 that maintains the same functions as one of SEQ ID NOs: 49, 129-136, or 179-183. In some embodiments of any of the aspects, the repressible protease of a CAR polypeptide as described herein comprises SEQ ID NOs: 49, 129-136, 179-183 or an amino acid sequence that is at least 95% identical to the sequence of one of SEQ ID NOs: 49, 129-136, or 179-183 that maintains the same functions as one of SEQ ID NOs: 49, 129-136, or 179-183.

[0353] In some embodiments, the repressible protease of a CAR polypeptide as described herein is encoded by a nucleic acid sequence comprising SEQ ID NO: 16 or a sequence that is at least 70%, at least 75%, at least 80%, at least 85%, at least 90%, at least 90%, at least 91%, at least 92%, at least 93%, at least 94%, at least 95%, at least 96%, at least 97%, at least 98%, or at least 99% identical to SEQ ID NO: 16 that maintains the same function or a codon-optimized version of SEQ ID NO: 16. In some embodiments, the repressible protease of a CAR polypeptide as described herein is encoded by a nucleic acid sequence comprising SEQ ID NO: 16 or a sequence that is at least 95% identical to SEQ ID NO: 16 that maintains the same function.

[0354] In some embodiments of any of the aspects, the repressible protease of a CAR polypeptide as described herein does not comprise at most the first (i.e., N-terminal) residues of SEQ ID NOs: 49 or 129-136. In some embodiments of any of the aspects, the repressible protease of a CAR polypeptide as described herein comprises residues 1-180, 2-180, 3-180, 4-180, 5-180, 6-180, 7-180, 8-180, 9-180, 10-180, 11-180, 12-180, 13-180, 14-180, 15-180, 16-180, 17-180, 18-180, 19-180, 20-180, 21-180, 22-180, 23-180, 24-180, 25-180, 26-180, 27-180, 28-180, 29-180, or 30-180 of SEQ ID NOs: 49, 129-136, or 179-183. 40-42 per Ashley

SEQ ID NO: 16, NS3 (genotype 1A), 567 nt; bold dotted underlined text
(e.g., nt 169-171 of SEQ ID NO: 16) indicates His-57 of the catalytic triad;
italicized double underlined text (e.g., nt 241-243 of SEQ ID NO: 16) indicates
Asp-81 of the catalytic triad; bold italicized dotted underlined text
(e.g., nt 415-417 of SEQ ID NO: 16) indicates Ser-139 of the catalytic triad;
zig zag underlined text (e.g.,nt 502-504 of SEQ ID NO: 16) indicates Asp-168.
GCGCCCATCACGGCGTACGCCCAGCAGACGAGAGGCCTCCTAGGGTGTATAATCACCAGCC
TGACTGGCCGGGACAAAAACCAAGTGGAGGGTGAGGTCCAGATCGTGTCAACTGCTACCCA
AACCTTCCTGGCAACGTGCATCAATGGGGTATGCTGGGCAGTCTAC [symbol] GGGGCCGGAACG
AGGACCATCGCATCACCCAAGGGTCCTGTCATCCAGATGTATACCAATGTGGACCAA [symbol] CT
TGTGGGCTGGCCCGCTCCTCAAGGTTCCCGCTCATTGACACCCTGTACCTGCGGCTCCTCGGA
CCTTTACCTGGTCACGAGGCACGCCGATGTCATTCCCGTGCGCCGGCGAGGTGATAGCAGGG
GTAGCCTGCTTTCGCCCCGGCCCATTTCCTACTTGAAAGGCTCC [symbol] GGGGGTCCGCTGTTGT
GCCCCGCGGGACACGCCGTGGGCCTATTCAGGGCCGCGGTGTGCACCCGTGGAGTGGCTAA
AGCGGTG [symbol] TTTATCCCTGTGGAGAACCTAGAGACAACCATGAGATCCCCGGTGTTCACGG
ACAACTCCTCT
SEQ ID NO: 49, NS3 (genotype 1A), 189 aa; bold dotted underlined text
indicates His-57 of the catalytic triad; italicized double underlined text
indicates Asp-81 of the catalytic triad; bold italicized dotted underlined
text indicates Ser-139 of the catalytic triad; zig zag underlined text
indicates Asp-168.
APITAYAQQTRGLLGCIITSLTGRDKNQVEGEVQIVSTATQTFLATCINGVCWAVY [symbol] GAGTRTIA
SPKGPVIQMYTNVDQ [symbol] LVGWPAPQGSRSLTPCTCGSSDLYLVTRHADVIPVRRRGDSRGSLLSPR
PISYLKGS [symbol] GGPLLCPAGHAVGLFRAAVCTRGVAKAV [symbol] FIPVENLETTMRSPVFTDNSS
SEQ ID NO: 129, NS3 (genotype 1A), 180 aa (see e.g., residues 1027-1206 of Hepatitis C
virus genotype 1 polyprotein, NCBI Reference Sequence: NP_671491.1.
APITAYAQQTRGLLGCIITSLTGRDKNQVEGEVQIVSTATQTFLATCINGVCWTVYHGAGTRTIAS
PKGPVIQMYTNVDQDLVGWPAPQGSRSLTPCTCGSSDLYLVTRHADVIPVRRRGDSRGSLLSPRP
ISYLKGSSGGPLLCPAGHAVGLFRAAVCTRGVAKAVDFIPVENLETTMR
SEQ ID NO: 130, NS3 (genotype 1B), 180 aa (see e.g., residues 1-180 Chain A, Ns3
Protease, PDB: 4K8B_A)
APITAYSQQTRGLLGCIITSLTGRDKNQVEGEVQVVSTATQSFLATCVNGVCWTVYHGAGSKTL
AGPKGPITQMYTNVDQDLVGWQAPPGARSLTPCTCGSSDLYLVTRHADVIPVRRRGDSRGSLLS
PRPVSYLKGSSGGPLLCPSGHAVGIFRAAVCTRGVAKAVDFVPVESMETTMR
SEQ ID NO: 131, NS3 (genotype 2), 180 aa (see e.g., residues 1031-1210 of Hepatitis C
virus genotype 2 polyprotein, NCBI Reference Sequence: YP_001469630.1
APITAYAQQTRGLLGTIVVSMTGRDKTEQAGEIQVLSTVTQSFLGTSISGVLWTVYHGAGNKTLA
GSRGPVTQMYSSAEGDLVGWPSPPGTKSLEPCTCGAVDLYLVTRNADVIPARRRGDKRGALLSP
RPLSTLKGSSGGPVLCPRGHAVGVFRAAVCSRGVAKSIDFIPVETLDIVTR
SEQ ID NO: 132, NS3 (genotype 3), 180 aa (see e.g., residues 1033-1212 of Hepatitis C
virus genotype 3 polyprotein, NCBI Reference Sequence: YP_001469631.1)
APITAYAQQTRGLLGTIVTSLTGRDKNVVTGEVQVLSTATQTFLGTTVGGVIWTVYHGAGSRTL
AGAKHPALQMYTNVDQDLVGWPAPPGAKSLEPCACGSSDLYLVTRDADVIPARRRGDSTASLL
SPRPLACLKGSSGGPVMCPSGHVAGIFRAAVCTRGVAKSLQFIPVETLSTQAR
SEQ ID NO: 133, NS3 (genotype 4), 180 aa (see e.g., residues 1027-1206 of Hepatitis C
virus genotype 4 polyprotein, NCBI Reference Sequence: YP_001469632.1)
APITAYAQQTRGLFSTIVTSLTGRDTNENCGEVQVLSTATQSFLGTAVNGVMWTVYHGAGAKTI
SGPKGPVNQMYTNVDQDLVGWPAPPGVRSLAPCTCGSADLYLVTRHADVIPVRRRGDTRGALL
SPRPISILKGSSGGPLLCPMGHRAGIFRAAVCTRGVAKAVDFVPVESLETTMR
SEQ ID NO: 134, NS3 (genotype 5), 180 aa (see e.g., residues 1028-1207 of Hepatitis C
virus genotype 5 polyprotein, NCBI Reference Sequence: YP_001469633.1)
APITAYAQQTRGVLGAIVLSLTGRDKNEAEGEVQFLSTATQTFLGICINGVMWTLFHGAGSKTLA
GPKGPVVQMYTNVDKDLVGWPSPPGKGSLTRCTCGSADLYLVTRHADVIPARRRGDTRASLLS
PRPISYLKGSSGGPIMCPSGHVVGVFRAAVCTRGVAKALEFVPVENLETTMR
SEQ ID NO: 135, NS3 (genotype 6), 180 aa (see e.g., residues 1032-1211 of Hepatitis C
virus genotype 6 polyprotein, NCBI Reference Sequence: YP_001469634.1)
APITAYAQQTRGLVGTIVTSLTGRDKNEAEGEVQVVSTATQSFLATTINGVLWTVYHGAGSKNL
AGPKGPVCQMYTNVDQDLVGWPAPLGARSLAPCTCGSSDLYLVTRGADVIPARRRGDTRAALL
SPRPISTLKGSSGGPLMCPSGHVVGLFRAAVCTRGVAKALDFIPVENMDTTMR
SEQ ID NO: 136, NS3 (genotype 7), 180 aa (see e.g., residues 1031-1210 of Hepatitis C
virus genotype 7 polyprotein, NCBI Reference Sequence: YP_009272536.1)
APISAYAQQTRGLISTLVVSLTGRDKNETAGEVQVLSTSTQTFLGTNVGGVMWGPYHGAGTRTV
AGRGGPVLQMYTSVSDDLVGWPAPPGSKSLEPCSCGSADLYLVTRNADVLPLRRKGDGTASLLS
PRPVSSLKGSSGGPVLCPQSHCVGIFRAAVCTRGVAKAVQFVPIEKMQVAQR
SEQ ID NO: 179, NS3 genotype 1a (HCV-H), 180 aa
APITAYAQQTRGLLGCIITSLTGRDKNQVEGEVQIVSTATQTFLATCINGVCWTVYHGAGTRTIAS
PKGPVIQMYTNVDQDLVGWPAPQGSRSLTPCTCGSSDLYLVTRHADVIPVRRRGDSRGSLLSPRP
ISYLKGSSGGPLLCPAGHAVGLFRAAVCTRGVTKAVDFIPVENLETTMR
SEQ ID NO: 180, NS3 genotype 1b (HCV-BK), 180 aa
APITAYSQQTRGLLGCIITSLTGRDKNQVEGEVQVVSTATQSFLATCVNGVCWTVYHGAGSKTL
AAPKGPITQMYTNVDQDLVGWPKPPGARSLTPCTCGSSDLYLVTRHADVIPVRRRGDSRGSLLS
PRPVSYLKGSSGGPLLCPFGHAVGIFRAAVCTRGVAKAVDFVPVESMETTMR
SEQ ID NO: 181, NS3 genotype 2a (HCV-J6), 180 aa
APITAYAQQTRGLLGTIVVSMTGRDKTEQAGEIQVLSTVTQSFLGTTISGVLWTVYHGAGNKTL
AGSRGPVTQMYSSAEGDLVGWPSPPGTKSLEPCTCGAVDLYLVTRNADVIPARRRGDKRGALLS
PRPLSTLKGSSGGPVLCPRGHAVGVFRAAVCSRGVAKSIDFIPVETLDIVTR
SEQ ID NO: 182, NS3 genotype 2b (HCV-J8), 180 aa
APITAYTQQTRGLLGAIVVSLTGRDKNEQAGQVQVLSSVTQTFLGTSISGVLWTVYHGAGNKTL
AGPKGPVTQMYTSAEGDLVGWPSPPGTKSLDPCTCGAVDLYLVTRNADVIPVRRKDDRRGALL
SPRPLSTLKGSSGGPVLCSRGHAVGLFRAAVCARGVAKSIDFIPVESLDVATR
SEQ ID NO: 183, NS3 genotype 3a (HCV-Nz11), 180 aa
APITAYAQQTRGLLGTIVTSLTGRDKNVVTGEVQVLSTATQTFLGTTVGGVIWTVYHGAGSRTL
AGAKHPALQMYTNVDQDLVGWPAPPGAKSLEPCACGSSDLYLVTRDADVIPARRRGDSTASLL
SPRPLACLKGSSGGPVMCPSGHVAGIFRAAVCTRGVAKSLQFIPVETLSTQAR

[0355] In some embodiments of any of the aspects, the polypeptide further comprising a cofactor for the repressible protease. As used herein the term “cofactor for the repressible protease” refers to a molecule that increases the activity of the repressible protease. In some embodiments of any of the aspects, a CAR polypeptide as described herein comprises 1, 2, 3, 4, 5, or more cofactors for the repressible protease. In some embodiments of any of the aspects, the CAR polypeptide comprises one cofactor for each repressible protease. In embodiments comprising multiple cofactors for the repressible protease, the multiple cofactors for the repressible protease can be different individual cofactors or multiple copies of the same cofactor, or a combination of the foregoing.

[0356] In some embodiments of any of the aspects, the cofactor is an HSV NS4A domain, and the repressible protease is HSV NS3. The nonstructural protein 4a (NS4A) is the smallest of the nonstructural HCV proteins. The NS4A protein has multiple functions in the HCV life cycle, including (1) anchoring the NS3-4A complex to the outer leaflet of the endoplasmic reticulum and mitochondrial outer membrane, (2) serving as a cofactor for the NS3A serine protease, (3) augmenting NS3A helicase activity, and (4) regulating NS5A hyperphosphorylation and viral replication. The interactions between NS4A and NS4B control genome replication and between NS3 and NS4A play a role in virus assembly.

[0357] In some embodiments of any of the aspects, a CAR polypeptide as described herein comprises the portion of the NS4a polypeptide that serves as a cofactor for NS3. Deletion analysis has shown that the central region (approximately residues 21 to 34) of the 54-residue NS4A protein is essential and sufficient for the cofactor function of the NS3 serine protease. Accordingly, in some embodiments of any of the aspects, the repressible protease cofactor comprises a 14-residue region of the wildtype NS4A protein.

[0358] In some embodiments of any of the aspects, the cofactor for the repressible protease can be an HCV genotype 1 NS4A, an HCV genotype 1a NS4A, an HCV genotype 1b NS4A, an HCV genotype 2 NS4A, an HCV genotype 2a NS4A, an HCV genotype 2b NS4A, an HCV genotype 3 NS4A, an HCV genotype 3a NS4A, an HCV genotype 3b NS4A, an HCV genotype 4 NS4A, an HCV genotype 4a NS4A, an HCV genotype 4b NS4A, an HCV genotype 5 NS4A, an HCV genotype 5a NS4A, an HCV genotype 5b NS4A, an HCV genotype 6 NS4A, an HCV genotype 6a NS4A, an HCV genotype 6b NS4A, an HCV genotype 7 NS4A, an HCV genotype 7a NS4A, or an HCV genotype 7b NS4A. In some embodiments of any of the aspects, the cofactor for the repressible protease can be any known NS4A genotype, variant, or mutant, e.g., that maintains the same function. In some embodiments of any of the aspects, the NS4A sequence comprises residues 21-31 of the NS4A protein from HCV-H, HCV-1, HCV-J1, HCV-BK, HCV-JK1, HCV-J4, HCV-J, HCV-J6, C14112, HCV-J8, D14114, HCV-Nz11, or HCV-K3a (see e.g., Chao Lin 2006 supra; see e.g., Table 13).

[0359] In some embodiments of any of the aspects, the cofactor for a repressible protease of a CAR polypeptide as described herein comprises SEQ ID NOs: 48, 98, 137-156, or an amino acid sequence that is at least 70%, at least 75%, at least 80%, at least 85%, at least 90%, at least 90%, at least 91%, at least 92%, at least 93%, at least 94%, at least 95%, at least 96%, at least 97%, at least 98%, or at least 99% identical to the sequence of one of SEQ ID NOs: 48, 98, 137-156 that maintains the same functions as one of SEQ ID NOs: 48, 98, 137-156. In some embodiments of any of the aspects, the cofactor for a repressible protease of a CAR polypeptide as described herein comprises SEQ ID NOs: 48, 98, 137-156, or an amino acid sequence that is at least 95% identical to the sequence of one of SEQ ID NOs: 48, 98, 137-156 that maintains the same functions as one of SEQ ID NOs: 48, 98, 137-156.

[0360] In some embodiments of any of the aspects, the cofactor for a repressible protease of a CAR polypeptide as described herein is encoded by a nucleic acid sequence comprising SEQ ID NOs: 15, 74 or a sequence that is at least 70%, at least 75%, at least 80%, at least 85%, at least 90%, at least 90%, at least 91%, at least 92%, at least 93%, at least 94%, at least 95%, at least 96%, at least 97%, at least 98%, or at least 99% identical to SEQ ID NOs: 15 or 74 that maintains the same function, or a codon-optimized version thereof. In some embodiments of any of the aspects, the cofactor for a repressible protease of a CAR polypeptide as described herein is encoded by a nucleic acid sequence comprising SEQ ID NOs: 15, 74 or a sequence that is at least 95% identical to SEQ ID NOs: 15 or 74 that maintains the same function.

[0361] In some embodiments of any of the aspects, the cofactor for the repressible protease of a CAR polypeptide as described herein comprises residues 1-14, 1-13, 1-12, 1-11, 1-10, 2-14, 2-13, 2-12, 2-11, 2-10, 3-14, 3-13, 3-12, 3-11, 3-10, 4-14, 4-13, 4-12, 4-11, or 4-10 of any of SEQ ID NOs: 48, 98, 137-143.

NS4A (genotype 1A), 39 nt
SEQ ID NO: 15
GGCTGCGTGGTCATAGTGGGCAGGATCGTCTTGTCCGGA
NS4A (genotype 1B), 36 nt
SEQ ID NO: 74
GGTTCTGTTGTTATTGTTGGTAGAATTATTTTATCT
NS4A (genotype 1A), 13 aa,
SEQ ID NO: 48
GCVVIVGRIVLSG
NS4A (genotype 1B), 12 aa,
SEQ ID NO: 98
GSVVIVGRIILS;
see e.g., Chain C, Nonstructural Protein, PDB: 4K8B_C.
NS4A (genotype 1), 14 aa (see e.g., residues 1678-1691 of Hepatitis C
virus genotype 1 polyprotein, NCBI Reference Sequence: NP_671491.1):
SEQ ID NO: 137
GCVVIVGRIVLSGK
NS4A (genotype 2), 14 aa (see e.g., residues 1682-1695 of Hepatitis C
virus genotype 2 polyprotein, NCBI Reference Sequence: YP_001469630.1:
SEQ ID NO: 138
GCVCIIGRLHINQR
NS4A (genotype 3), 14 aa (see e.g., residues 1684-1697 of Hepatitis C
virus genotype 3 polyprotein, NCBI Reference Sequence: YP_001469631.1):
SEQ ID NO: 139
GCVVIVGHIELEGK
NS4A (genotype 4), 14 aa (see e.g., residues 1678-1691 of Hepatitis C
virus genotype 4 polyprotein, NCBI Reference Sequence: YP_001469632.1):
SEQ ID NO: 140
GSVVIVGRVVLSGQ
NS4A (genotype 5), 14 aa (see e.g., residues 1679-1692 of Hepatitis C
virus genotype 5 polyprotein, NCBI Reference Sequence: YP_001469633.1):
SEQ ID NO: 141
GSVAIVGRIILSGR
NS4A (genotype 6), 14 aa (see e.g., residues 1683-1696 of Hepatitis C
virus genotype 6 polyprotein, NCBI Reference Sequence: YP_001469634.1):
SEQ ID NO: 142
GCVVICGRIVTSGK
NS4A (genotype 7), 14 aa (see e.g., residues 1682-1695 of Hepatitis C
virus genotype 7 polyprotein, NCBI Reference Sequence: YP_009272536.1):
SEQ ID NO: 143
GSVVVVGRVVLGSN

[0362] In some embodiments of any of the aspects, the NS4A sequence is selected from Table 13. In one embodiment, the NS4A comprises residues 21-31 of SEQ ID NO: 144-156 or a sequence that is at least 70% identical.

TABLE 13
Exemplary NS4A sequences (see e.g., Chao Lin 2006 supra).
Residues 21-31 are bolded.

| SEQ | Genotype | |
|---|---|---|
| ID NO | (strain) | Sequence |
| 144 | 1a (HCV-H) | STWVL VGGVL AALAA YCLST GCVVI VGRIV LSGKP AIIPD REVLY QEFDE MEEC |
| 145 | 1a (HCV-1) | STWVL VGGVL AALAA YCLST GCVVI VGRVV LSGKP AIIPD REVLY REFDE MEEC |
| 146 | 1a (HCV-J1) | STWVL VGGVL AALAA YCLST GCVVI VGRIV LSGRP AIIPD REVLY REFDE MEEC |
| 147 | 1b (HCV-BK) | STWVL VGGVL AALAA YCLTT GSVVI VGRII LSGRP AIVPD RELLY QEFDE MEEC |
| 148 | 1b (HCV-JK1) | STWVL VGGVL AALAA YCLTT GSVVI VGRII LSGRP AIIPD RELLY QEFDE MEEC |
| 149 | 1b (HCV-J4) | STWVL VGGVL AALAA YCLTT GSVVI VGRII LSGKP AVVPD RELLY QEFDE MEEC |
| 150 | 1b (HCV-J) | STWVL VGGVL AALAA YCLTT GSVVI VGRII LSGRP AVIPD RELLY REFDE MEEC |
| 151 | 2a (HCV-J6) | STWVL AGGVL AAVAA YCLAT GCVCI IGRLH VNQRA VVAPD KEVLY EAFDE MEEC |
| 152 | 2a (D14112) | STWVL AGGVL AAVAA YCLAT GCVSI IGRLH INGRA VVAPD KEVLY EAFDE MEEC |
| 153 | 2b (HCV-J8) | SSWVL AGGVL AAVAA YCLAT GCISI IGRLH LNDRV VVAPD KEILY EAFDE MEEC |
| 154 | 2b (D14114) | STWVL AGGVL AAVAA YCLAT GCVSI IGRLH LNDQV VVTPD KEILY EAFDE MEEC |
| 155 | 3a (HCV-Nz11) | STWVL LGGVL AALAA YCLSV GCVVI VGHIE LEGKP ALVPD KEVLY QQYDE MEEC |
| 156 | 3a (HCV-K3a) | STWVL LGGVL AAVAA YCLSV GCVVI VGHIE LGGKP ALVPD KEVLY QQYDE MEEC |

[0363] In some embodiments of any of the aspects, a CAR polypeptide as described herein can comprise any combination of NS3 and NS4A genotypes, variants, or mutants as described herein. In one embodiment, the NS3 and NS4A are selected from selected from the same genotype as each other. In some embodiments of any of the aspects, the NS3 is genotype 1a and the NS4A is genotype 1b. In some embodiments of any of the aspects, the NS3 is genotype 1b and the NS4A is genotype 1a.

[0364] In some embodiments of any of the aspects, a CAR polypeptide as described herein comprises an HSV NS4A domain adjacent to the NS3 repressible protease. In some embodiments of any of the aspects, the NS4A domain is N-terminal of the NS3 repressible protease. In some embodiments of any of the aspects, the NS4A domain is C-terminal of the NS3 repressible protease. In some embodiments of any of the aspects, the CAR polypeptide comprises a linker between the NS4A domain and the NS3 repressible protease. Non-limiting examples of linker (e.g., between the NS4A domain and the NS3 repressible protease) include: SGTS (SEQ ID NO: 157) and GSGS (SEQ ID NO: 158).

[0365] In some embodiments of any of the aspects, any two domains as described herein in a CAR polypeptide can be joined into a single polypeptide by positioning a peptide linker, e.g., a flexible linker between them. As used herein “peptide linker” refers to an oligo- or polypeptide region from about 2 to 100 amino acids in length, which links together any of the sequences of the polypeptides as described herein. In some embodiment, linkers can include or be composed of flexible residues such as glycine and serine so that the adjacent protein domains are free to move relative to one another. Longer linkers may be used when it is desirable to ensure that two adjacent domains do not sterically interfere with one another. Linkers may be cleavable or non-cleavable.

[0366] Described herein are CAR polypeptides comprising protease cleavage sites (e.g., ON-switch CAR polypeptides and the first AND-gate CAR polypeptide). As used herein, the term “protease cleavage site” refers to a specific sequence or sequence motif recognized by and cleaved by the repressible protease. A cleavage site for a protease includes the specific amino acid sequence or motif recognized by the protease during proteolytic cleavage and typically includes the surrounding one to six amino acids on either side of the scissile bond, which bind to the active site of the protease and are used for recognition as a substrate. In some embodiments of any of the aspects, the protease cleavage site can be any site specifically bound by and cleaved by the repressible protease. In some embodiments of any of the aspects, a CAR polypeptide as described herein (or the CAR polypeptide system collectively) comprises 1, 2, 3, 4, 5, or more protease cleavage sites. In some embodiments of any of the aspects, the CAR polypeptide comprises two protease cleavage sites. In embodiments comprising multiple protease cleavage sites, the multiple protease cleavage sites can be different individual protease cleavage sites or multiple copies of the same protease cleavage sites, or a combination of the foregoing.

[0367] As a non-limiting example, during HCV replication, the NS3-4A serine protease is responsible for the proteolytic cleavage at four junctions of the HCV polyprotein precursor: NS3/NS4A (self-cleavage), NS4A/NS4B, NS4B/NS5A, and NS5A/NS5B. Accordingly, the protease cleavage site of a CAR polypeptide as described herein can be a NS3/NS4A cleavage site, a NS4A/NS4B cleavage site, a NS4B/NS5A cleavage site, or a NS5A/NS5B cleavage site. The protease cleavage site can be a protease cleavage sites from HCV genotype 1, genotype 1a, genotype 1b, genotype 2, genotype 2a, genotype 2b, genotype 3, genotype 3a, genotype 3b, genotype 4, genotype 4a, genotype 4b, genotype 5, genotype 5a, genotype 5b, genotype 6, genotype 6a, genotype 6b, genotype 7, genotype 7a NS4A, or genotype 7b. In some embodiments of any of the aspects, the protease cleavage site can be any known NS3/NS4A protease cleavage site or variant or mutant thereof, e.g., that maintains the same function. In some embodiments of any of the aspects, the NS4A sequence comprises residues 21-31 of the NS4A protein from HCV-H, HCV-1, HCV-J1, HCV-BK, HCV-JK1, HCV-J4, HCV-J, HCV-J6, C14112, HCV-J8, D14114, HCV-Nz11, or HCV-K3a (see e.g., Chao Lin 2006 supra).

[0368] In some embodiments of any of the aspects, the protease cleavage site of a CAR polypeptide as described herein comprises SEQ ID NOs: 45, 50, 159-178, or an amino acid sequence that is at least 70%, at least 75%, at least 80%, at least 85%, at least 90%, at least 90%, at least 91%, at least 92%, at least 93%, at least 94%, at least 95%, at least 96%, at least 97%, at least 98%, or at least 99% identical to the sequence of one of SEQ ID NOs: 45, 50, 159-178 that maintains the same functions as one of SEQ ID NOs: 45, 50, 159-178. In some embodiments of any of the aspects, the protease cleavage site of a CAR polypeptide as described herein comprises SEQ ID NOs: 45, 50, 159-178, or an amino acid sequence that is at least 95% identical to the sequence of one of SEQ ID NOs: 45, 50, 159-178 that maintains the same functions as one of SEQ ID NOs: 45, 50, 159-178.

[0369] In some embodiments of any of the aspects, the repressible protease of a CAR polypeptide as described herein is encoded by a nucleic acid sequence comprising SEQ ID NOs: 12, 17 or a sequence that is at least 70%, at least 75%, at least 80%, at least 85%, at least 90%, at least 90%, at least 91%, at least 92%, at least 93%, at least 94%, at least 95%, at least 96%, at least 97%, at least 98%, or at least 99% identical to one of SEQ ID NOs: 12 or 17 that maintains the same function, or a codon-optimized version thereof. In some embodiments of any of the aspects, the repressible protease of a CAR polypeptide as described herein is encoded by a nucleic acid sequence comprising SEQ ID NOs: 12, 17 or a sequence that is at least 95% identical to one of SEQ ID NOs: 12 or 17 that maintains the same function.

[0370] In some embodiments of any of the aspects, the protease cleavage site of a CAR polypeptide as described herein comprises residues 1-20, 1-19, 1-18, 1-17, 1-16, 1-15, 2-20, 2-19, 2-18, 2-17, 2-16, 2-15, 3-20, 3-19, 3-18, 3-17, 3-16, 3-15, 4-20, 4-19, 4-18, 4-17, 4-16, 4-15, 5-20, 5-19, 5-18, 5-17, 5-16, or 5-15, of any of SEQ ID NOs: 45, 50, 159-178.

NS5A/5B cut site (CC), 30 nt
SEQ ID NO: 12
GAGGACGTGGTGTGCTGCCACTCAATCTAC
NS4A/4B cut site (CS), 42 nt
SEQ ID NO: 17
CTCTACCAGGAGTTCGATGAGATGGAAGAGTGCTCTCAGCAC
NS5A/5B cut site (CC), 10 aa,
SEQ ID NO: 45
EDVVCCHSIY
NS4A/4B cut site (CS), 14 aa,
SEQ ID NO: 50
LYQEFDEMEECSQH

TABLE 14
Exemplary NS3/NS4A protease cleavage sites (see e.g., Chao Lin 2006 supra).

| Cleavage Site | | | Sequence (cleavage site shown |
|---|---|---|---|
| Type | SEQ ID NO | Genotype (Strain) | with space) |
| NS3/NS4A | 159 | 1a (HCV-H) | CMSADLEVVT STWVLVGGVL |
| | 160 | 1b (HCV-BK) | CMSADLEVVT STWVLVGGVL |
| | 161 | 2a (HCV-J6) | CMQADLEVMT STWVLAGGVL |
| | 162 | 2b (HCV-J8) | CMQADLEIMT SSWVLAGGVL |
| | 163 | 3a (HCV-Nz11) | CMSADLEVTT STWVLLGGVL |
| NS4A/NS4B | 164 | 1a (HCV-H) | YQEFDEMEEC SQHLPYIEQG |
| | 165 | 1b (HCV-BK) | YQEFDEMEEC ASHLPYIEQG |
| | 166 | 2a (HCV-J6) | YEAFDEMEEC ASRAALIEEG |
| | 167 | 2b (HCV-J8) | YEAFDEMEEC ASKAALIEEG |
| | 168 | 3a (HCV-Nz11) | YQQYDEMEEC SQAAPYIEQA |
| NS4B/NS5A | 169 | 1a (HCV-H) | WISSECTTPC SGSWLRDVWD |
| | 170 | 1b (HCV-BK) | WINEDCSTPC SGSWLRDVWD |
| | 171 | 2a (HCV-J6) | WITEDCPIPC SGSWLRDVWD |
| | 172 | 2b (HCV-J8) | WITEDCPVPC SGSWLQDIWD |
| | 173 | 3a (HCV-Nz11) | WINEDYPSPC SDDWLRTIWD |
| NS5A/NS5B | 174 | 1a (HCV-H) | GADTEDVVCC SMSYSWTGAL |
| | 175 | 1b (HCV-BK) | EEASEDVVCC SMSYTWTGAL |
| | 176 | 2a (HCV-J6) | SEEDDSVVCC SMSYSWTGAL |
| | 177 | 2b (HCV-J8) | SDQEDSVICC SMSYSWTGAL |
| | 178 | 3a (HCV-Nz11) | DSEEQSVVCC SMSYSWTGAL |

[0371] In some embodiments of any of the aspects, a CAR polypeptide as described herein comprises two protease cleavage sites, with one N-terminal of the NS3-NS4A complex, and the other C-terminal of the NS3-NS4A complex (see e.g., Table 15). In some embodiments of any of the aspects, the two protease cleavage sites can be the same cleavage sites or different cleavage sites.

TABLE 15
Exemplary Protease Cleavage Site Combinations.

| N | 3/4A | | | | 4A/4B | | | |
|---|---|---|---|---|---|---|---|---|
| C | 3/4A | 4A/4B | 4B/5A | 5A/5B | 3/4A | 4A/4B | 4B/5A | 5A/5B |
| N | 4B/5A | | | | 5A/5B | | | |
| C | 3/4A | 4A/4B | 4B/5A | 5A/5B | 3/4A | 4A/4B | 4B/5A | 5A/5B |

“N” indicates N-terminal of the NS3-NS4A complex.
“C” indicates C-terminal of the NS3-NS4A complex.
“3/4A” indicates the NS3/NS4A cleavage site.
“4A/4B” indicates the NS4A/NS4B cleavage site.
“4B/5A” indicates the NS4B/NS5A cleavage site.
“5A/5B” indicates the NS5A/NS5B cleavage site.

[0372] In some embodiments of any of the aspects, a CAR polypeptide as described herein comprise any known genotypes, variants, or mutants of NS3/NS4A, NS4A/NS4B, NS4B/NS5A, and NS5A/NS5B cleavage sites. In one embodiment, the two protease cleavage sites are selected from selected from the same genotype as each other.

[0373] In some embodiments of any of the aspects, the protease cleavage site is located or engineered such that, when the CAR (e.g., drug-inducible CAR polypeptide, first AND-gate CAR polypeptide) cleaves itself using the repressible protease in the absence of a protease inhibitor, the resulting amino acid at the N-terminus of the newly cleaved polypeptide(s) causes the polypeptide(s) to degrade at a faster rate and have a shorter half-life compared to other cleaved polypeptides. According to the N-end rule, newly cleaved polypeptides comprising the amino acid His, Tyr, Gln, Asp, Asn, Phe, Leu, Trp, Lys, or Arg at the N-terminus exhibit a high degradation rate and a short half-life (e.g., 10 minutes or less in yeast; 1-5.5 hours in mammalian reticulocytes). Comparatively, newly cleaved polypeptides comprising the amino acid Val, Met, Gly, Pro, Ala, Ser, Thr, Cys, Ile, or Glu at the N-terminus exhibit a lower degradation rate and a longer half-life (e.g., 30 minutes or more in yeast; 1-100 hours in mammalian reticulocytes). See e.g., Gonda et al., Universality and Structure of the N-end Rule, The Journal of Biological Chemistry, Vol. 264 (28), pp. 16700-16712, 1989, the content of which is incorporated herein by reference in its entirety. Accordingly, in some embodiments of any of the aspects, the resulting amino acid at the N-terminus of a newly cleaved CAR polypeptide as described herein is His, Tyr, Gln, Asp, Asn, Phe, Leu, Trp, Lys, or Arg. In some embodiments of any of the aspects, the resulting amino acid at the N-terminus of the newly cleaved CAR polypeptide as described herein is not Val, Met, Gly, Pro, Ala, Ser, Thr, Cys, Ile, or Glu.

[0374] In some embodiments of any of the aspects, the N-terminus of a newly cleaved CAR polypeptide as described herein comprises SEQ ID NO: 46 or an amino acid sequence that is at least 70%, at least 75%, at least 80%, at least 85%, at least 90%, at least 90%, at least 91%, at least 92%, at least 93%, at least 94%, at least 95%, at least 96%, at least 97%, at least 98%, or at least 99% identical to the sequence of SEQ ID NO: 46 that maintains a His or another highly degraded amino acid at the N-terminus. In some embodiments of any of the aspects, the N-terminus of a newly cleaved CAR polypeptide as described herein comprises SEQ ID NO: 46 or an amino acid sequence that is at least 95% identical to the sequence of SEQ ID NO: 46 that maintains the same function.

[0375] In some embodiments of any of the aspects, the N-terminus of a newly cleaved CAR polypeptide as described herein is encoded by a nucleic acid sequence comprising SEQ ID NO: 13, or a sequence that is at least 70%, at least 75%, at least 80%, at least 85%, at least 90%, at least 90%, at least 91%, at least 92%, at least 93%, at least 94%, at least 95%, at least 96%, at least 97%, at least 98%, or at least 99% identical to SEQ ID NO: 13 that maintains a His or another highly degraded amino acid at the N-terminus or a codon-optimized version of SEQ ID NO: 13. In some embodiments of any of the aspects, the N-terminus of a newly cleaved CAR polypeptide as described herein is encoded by a nucleic acid sequence comprising SEQ ID NO: 13, or a sequence that is at least 95% identical to SEQ ID NO: 13 that maintains the same function.

SEQ ID NO: 13, N-end rule, 24 nt,
CACTCAATCTACGGCAAGAAGAAG
SEQ ID NO: 46, N-end rule, 8 aa, HSIYGKKK

[0376] In some embodiments of any of the aspects, a CAR polypeptide as described herein (e.g., ON-switch CAR polypeptide or first polypeptide of the AND-gate CAR system) comprises a repressible protease that is catalytically active. For HCV NS3, the catalytic triad comprises His-57, Asp-81, and Ser-139. In regard to a repressible protease, “catalytically active” refers to the ability to cleave at a protease cleavage site. In some embodiments of any of the aspects, the catalytically active repressible protease can be any repressible protease as described further herein that maintains the catalytic triad, i.e., comprises no non-synonymous substitutions at His-57, Asp-81, and/or Ser-139.

[0377] In some embodiments of any of the aspects, a CAR polypeptide as described herein (e.g., second polypeptide of the OFF-switch CAR system or second polypeptide of the reader CAR system) comprises a repressible protease that is catalytically inactive, i.e., dead. In regard to a repressible protease, “catalytically inactive” refers to the inability to cleave at a protease cleavage site. Accordingly, a catalytically inactive NS3 protease can comprise a nonsynonymous mutation at any one of His-57, Asp-81, and Ser-139. Non-limiting examples of NS3 inactivating mutations include H57A, D81A, S139A, or any combination thereof. As such, any one of SEQ ID NOs: 49 or 129-136 can comprise a H57A mutation; a D81A mutation; a S139A mutation; any nonsynonymous mutation to His-57, Asp-81, and Ser-139; or any combination thereof. In some embodiments of any of the aspects, any one of SEQ ID NOs: 49 or 129-136 can comprise a S139A mutation. In some embodiments of any of the aspects, a mutation to the catalytic triad does not disrupt other functions of the repressible protease, e.g., binding to a protease inhibitor, binding to a peptide domain, or binding to a reader domain.

[0378] In some embodiments of any of the aspects, a catalytically-inactive repressible protease of a CAR polypeptide as described herein comprises SEQ ID NOs: 99 or 103, or an amino acid sequence that is at least 70%, at least 75%, at least 80%, at least 85%, at least 90%, at least 90%, at least 91%, at least 92%, at least 93%, at least 94%, at least 95%, at least 96%, at least 97%, at least 98%, or at least 99% identical to the sequence of SEQ ID NOs: 99 or 103 that maintains the same functions as SEQ ID NOs: 99 or 103 (e.g., catalytically inactive). In some embodiments of any of the aspects, a catalytically-inactive repressible protease of a CAR polypeptide as described herein comprises SEQ ID NOs: 99 or 103, or an amino acid sequence that is at least 95% identical to the sequence of SEQ ID NOs: 99 or 103 that maintains the same functions as SEQ ID NOs: 99 or 103 (e.g., catalytically inactive).

[0379] In some embodiments of any of the aspects, a catalytically-inactive repressible protease is encoded by a nucleic acid sequence comprising SEQ ID NOs: 75, 79 or a sequence that is at least 70%, at least 75%, at least 80%, at least 85%, at least 90%, at least 90%, at least 91%, at least 92%, at least 93%, at least 94%, at least 95%, at least 96%, at least 97%, at least 98%, or at least 99% identical to SEQ ID NOs: 75 or 79 that maintains the same function, or a codon-optimized version thereof. In some embodiments of any of the aspects, a catalytically-inactive repressible protease is encoded by a nucleic acid sequence comprising SEQ ID NOs: 75, 79 or a sequence that is at least 95% identical to SEQ ID NOs: 75 or 79 that maintains the same function.

SEQ ID NO: 75, NS3 (genotype 1B; S139A), 537 nt; bold text (e.g., nt 409-411 of SEQ ID
NO: 75) indicates the conserved S139 residue mutated to alanine, i.e., S139A.
ATCACGGCCTACTCCCAACAGACGCGGGGCCTACTTGGTTGCATCATCACTAGCCTCACAGG
CCGGGACAAGAACCAGGTCGAAGGGGAGGTTCAAGTGGTTTCTACCGCAACACAATCTTTC
CTGGCGACCTGCGTCAACGGCGTGTGCTGGACTGTCTACCATGGCGCTGGCTCGAAGACCCT
AGCCGGTCCAAAAGGTCCAATCACCCAAATGTACACCAATGTAGACCAGGACCTCGTCGGC
TGGCAGGCGCCTCCAGGGGCGCGCTCCTTGACACCATGCACCTGTGGCAGCTCGGACCTTTA
CTTGGTCACGAGACATGCTGATGTCATTCCGGTGCGCCGGCGAGGCGACAGCAGGGGAAGT
CTACTCTCCCCCAGGCCCGTCTCCTACCTGAAAGGCTCCGCAGGTGGTCCATTGCTTTGCCCT
TCGGGGCACGCTGTGGGCATCTTCCGGGCTGCTGTGTGCACCCGGGGGGTCGCGAAGGCGGT
GGACTTCGTGCCCGTTGAGTCTATGGAAACTACCATGCGGTCT
SEQ ID NO: 79, NS3 (genotype 1A; S139A), 567 nt; bold dotted underlined text
(e.g., nt 169-171 of SEQ ID NO: 16) indicates His-57 of the catalytic triad;
italicized double underlined text (e.g., nt 241-243 of SEQ ID NO: 16) indicates
Asp-81 of the catalytic triad; bold italicized dotted underlined text (e.g.,
nt 415-417 of SEQ ID NO: 16) indicates Ser-139 of the catalytic triad
mutated to alanine(S139A); zig zag underlined text
(e.g., nt 502-504 of SEQ ID NO: 16) indicates Asp-168.
GCGCCCATCACGGCGTACGCCCAGCAGACGAGAGGCCTCCTAGGGTGTATAATCACCAGCC
TGACTGGCCGGGACAAAAACCAAGTGGAGGGTGAGGTCCAGATCGTGTCAACTGCTACCCA
AACCTTCCTGGCAACGTGCATCAATGGGGTATGCTGGGCAGTCTAC [symbol] GGGGCCGGAACG
AGGACCATCGCATCACCCAAGGGTCCTGTCATCCAGATGTATACCAATGTGGACCAA [symbol] CT
TGTGGGCTGGCCCGCTCCTCAAGGTTCCCGCTCATTGACACCCTGTACCTGCGGCTCCTCGGA
CCTTTACCTGGTCACGAGGCACGCCGATGTCATTCCCGTGCGCCGGCGAGGTGATAGCAGGG
GTAGCCTGCTTTCGCCCCGGCCCATTTCCTACTTGAAAGGCTCC [symbol] GGGGGTCCGCTGTTGT
GCCCCGCGGGACACGCCGTGGGCCTATTCAGGGCCGCGGTGTGCACCCGTGGAGTGGCTAA
AGCGGTG [symbol] TTTATCCCTGTGGAGAACCTAGAGACAACCATGAGATCCCCGGTGTTCACGG
ACAACTCCTCT
SEQ ID NO: 99, NS3 (genotype 1B; S139A), 179 aa; bold text (e.g.,
aa 409-411 of SEQ ID NO: 75) indicates S139A.
ITAYSQQTRGLLGCIITSLTGRDKNQVEGEVQVVSTATQSFLATCVNGVCWTVYHGAGSKTLAG
PKGPITQMYTNVDQDLVGWQAPPGARSLTPCTCGSSDLYLVTRHADVIPVRRRGDSRGSLLSPRP
VSYLKGSAGGPLLCPSGHAVGIFRAAVCTRGVAKAVDFVPVESMETTMRS
SEQ ID NO: 103, NS3 (genotype 1A; S139A), 189 aa; bold dotted underlined
text (e.g., aa 169-171 of SEQ ID NO: 16) indicates His-57 of the catalytic
triad; italicized double underlined text (e.g., aa 241-243 of SEQ ID NO: 16)
indicates Asp-81 of the catalytic triad; bold italicized dotted underlined
text (e.g., aa 415-417 of SEQ ID NO: 16) indicates Ser-139
of the catalytic triad mutated to alanine (S139A); zig zag underlined
text (e.g., aa 502-504 of SEQ ID NO: 16) indicates Asp-168.
APITAYAQQTRGLLGCIITSLTGRDKNQVEGEVQIVSTATQTFLATCINGVCWAVYHGAGTRTIA
SPKGPVIQMYTNVDQDLVGWPAPQGSRSLTPCTCGSSDLYLVTRHADVIPVRRRGDSRGSLLSPR
PISYLKGSAGGPLLCPAGHAVGLFRAAVCTRGVAKAVDFIPVENLETTMRSPVFTDNSS

[0380] In some embodiments of any of the aspects, a CAR polypeptide as described herein is in combination with a protease inhibitor. As used herein, “in combination with” refers to two or more substances being present in the same formulation in any molecular or physical arrangement, e.g., in an admixture, in a solution, in a mixture, in a suspension, in a colloid, in an emulsion. The formulation can be a homogeneous or heterogeneous mixture. In some embodiments of any of the aspects, the active compound(s) can be comprised by a superstructure, e.g., nanoparticles, liposomes, vectors, cells, scaffolds, or the like, said superstructure is which in solution, mixture, admixture, suspension, etc., with the CAR polypeptide or CAR polypeptide system. In some embodiments of any of the aspects, the CAR polypeptide is bound to a protease inhibitor bound to the repressible protease. In some embodiments of any of the aspects, the CAR polypeptide is bound specifically to a protease inhibitor bound to the repressible protease.

[0381] In some embodiments of any of the aspects, the CAR polypeptide is in combination with 1, 2, 3, 4, 5, or more protease inhibitors. In some embodiments of any of the aspects, the CAR polypeptide is in combination with one protease inhibitor. In embodiments comprising multiple protease inhibitors, the multiple protease inhibitors can be different individual protease inhibitors or multiple copies of the same protease inhibitor, or a combination of the foregoing.

[0382] In some embodiments of any of the aspects, the protease inhibitor is grazoprevir (abbreviated as GZV or GZP; see e.g., PubChem CID: 44603531). In some embodiments of any of the aspects, the protease inhibitor is danoprevir (DNV; see e.g., PubChem CID: 11285588). In some embodiments of any of the aspects, the protease inhibitor is an approved NS3 protease inhibitor, such as but not limited to grazoprevir, danoprevir, simeprevir, asunaprevir, ciluprevir, boceprevir, sovaprevir, paritaprevir, ombitasvir, paritaprevir, ritonavir, dasabuvir, and telaprevir. Additional non-limiting examples of NS3 protease inhibitors are listed in Table 16 (see e.g., McCauley and Rudd, Hepatitis C virus NS3/4a protease inhibitors, Current Opinion in Pharmacology 2016, 30:84-92; the content of which is incorporated herein by reference in its entirety).

TABLE 16
Exemplary NS3/NS4A protease inhibitors

| Description or Name(s) | Structure |
|---|---|
| The N-terminal hexapeptide product of substrate cleavage (e.g., DDIVPC-OH) | [chemical structure] |
| One of the products of cleavage of the NS4a- NS4b peptide (e.g., Ac- DEMEEC-OH) | [chemical structure] |
| VICTRELIS ™ boceprevir SCH503034 | [chemical structure] |
| INCIVEK ™, INCIVIO ™, telaprevir, VX-950 | [chemical structure] |
| Ciluprevir; BILN-2061 | [chemical structure] |
| BMS-605339 | [chemical structure] |
| MK-4519 | [chemical structure] |
| faldaprevir, BI-201335 | [chemical structure] |
| Danoprevir, ITMN-191, R7227 | [chemical structure] |
| SUNVEPRA ™, asunaprevir, BMS- 650032 | [chemical structure] |
| VANIHEP ™, vaniprevir, MK-7009 | [chemical structure] |
| OLYSIO ™, simeprevir, TMC-435350 | [chemical structure] |
| Sovaprevir, ACH-1625 | [chemical structure] |
| Deldeprevir/neceprevir, ACH-2684 | [chemical structure] |
| IDX320 | [chemical structure] |
| GS-9256 | [chemical structure] |
| PHX1766 | [chemical structure] |
| MK-2748 | [chemical structure] |
| Vedrorevir, GS-9451, GS-9451 | [chemical structure] |
| MK-6325 | [chemical structure] |
| MK-8831 | [chemical structure] |
| VIKERA PAK ™, paritaprevir, ABT-450 | [chemical structure] |
| ZEPATIER ®, grazoprevir, MK-5172 | [chemical structure] |
| Glecaprevir, ABT-493 | [chemical structure] |
| Voxilaprevir, GS-9857 | [chemical structure] |

[0383] In some embodiments of any of the aspects, a repressible protease as described herein is resistant to 1, 2, 3, 4, 5, or more different protease inhibitors as described herein. Non-limiting examples of NS3 amino acid substitutions conferring resistance to HCV NS3 protease inhibitors include: V36L (e.g., genotype 1b), V36M (e.g., genotype 2a), T54S (e.g., genotype 1b), Y56F (e.g., genotype 1b), Q80L (e.g., genotype 1b), Q80R (e.g., genotype 1b), Q80K (e.g., genotype 1a, 1b, 6a), Y132I (e.g., genotype 1b), A156S (e.g., genotype 2a), A156G, A156T, A156V, D168A (e.g., genotype 1b), I170V (e.g., genotype 1b), S20N, R26K, Q28R, A39T, Q41R, I71V, Q80R, Q86R, P89L, P89S, S101N, A111S, P115S, S122R, R155Q, L144F, A150V, R155W, V158L, D168A, D168G, D168H, D168N, D168V, D168E, D168Y, E176K, T178S, M179I, M179V, and M179T. See e.g., Sun et al., Gene Expr. 2018, 18(1): 63-69; Kliemann et al., World J Gastroenterol. 2016 Oct. 28, 22(40): 8910-8917; U.S. Pat. Nos. 7,208,309; 7,494,660; the contents of each of which are incorporated herein by reference in their entireties.

[0384] In some embodiments of any of the aspects, a CAR polypeptide as described herein comprises an NS3 protease comprising at least one resistance mutation as described herein or any combination thereof. In some embodiments of any of the aspects, a CAR polypeptide as described herein comprises an NS3 protease that is resistant to one protease inhibitor but responsive to at least one other protease inhibitor. In some embodiments of any of the aspects, a CAR system comprises: (a) a first CAR polypeptide comprising a repressible protease (e.g., NS3) that is resistant to a first protease inhibitor and that is susceptible to a second protease inhibitor; and (b) a second CAR polypeptide comprising a repressible protease (e.g., NS3) that is susceptible to a first protease inhibitor and that is resistant to a second protease inhibitor. Accordingly, presence of the first protease inhibitor can modulate the activity of the second CAR polypeptide but not the first CAR polypeptide, while the presence of the second protease inhibitor can modulate the activity of the first CAR polypeptide but not the second CAR polypeptide.

[0385] In some embodiments of any of the aspects, the repressible protease exhibits increased solubility compared to the wild-type protease. As a non-limiting example, the NS3 protease can comprise at least one of the following mutations or any combination thereof: Leu13 is substituted to Glu; Leu14 is substituted to Glu; Ile 17 is substituted to Gln; Ile 18 is substituted to Glu; and/or Leu21 is substituted to Gin. In some embodiments of any of the aspects, a CAR polypeptide as described herein comprises a repressible protease comprising SEQ ID NOs: 184-191, 205, or a sequence that is at least 70%, at least 75%, at least 80%, at least 85%, at least 90%, at least 90%, at least 91%, at least 92%, at least 93%, at least 94%, at least 95%, at least 96%, at least 97%, at least 98%, or at least 99% identical to the sequence of one of SEQ ID NOs: 184-191 or 205 that maintains the same functions (e.g., serine protease; increased solubility) as SEQ ID NOs: 184-191 or 205; see e.g., U.S. Pat. No. 6,333,186 and US Patent Publication US20020106642, the contents of each are incorporated herein by reference in their entireties. In some embodiments of any of the aspects, a CAR polypeptide as described herein comprises a repressible protease comprising SEQ ID NOs: 184-191, 205, or a sequence that is at least 95% identical to the sequence of one of SEQ ID NOs: 184-191 or 205 that maintains the same functions (e.g., serine protease; increased solubility) as SEQ ID NOs: 184-191 or 205.

SEQ ID NO: 184, soluble NS3, 182 aa
MAPITAYAQQTRGLLGCIITSLTGRDKNQVEGEVQIVSTAAQTFLATC
INGVCWTVYHGAGTRTIASPKGPVIQMYTNVDKDLVGWPAPQGSRSLT
PCTCGSSDLYLVTRHADVIPVRRRGDSRGSLLSPRPISYLKGSSGGPL
LCPAGHAVGIFRAAVCTRGVAKAVDFIPVESLETTMRS
SEQ ID NO: 185, soluble NS3/NS4A, 195 aa
MKKKGSVVIVGRIVLNGAYAQQTRGLLGCIITSLTGRDKNQVEGEVQI
VSTAAQTFLATCINGVCWTVYHGAGTRTIASPKGPVIQMYTNVDKDLV
GWPAPQGSRSLTPCTCGSSDLYLVTRHADVIPVRRRGDSRGSLLSPRP
ISYLKGSSGGPLLCPAGHAVGIFRAAVCTRGVAKAVDFIPVESLETTM
RSP
SEQ ID NO: 186, soluble NS3/NS4A, 195 aa
MKKKGSVVIVGRIVLNGAYAQQTRGEEGCQETSQTGRDKNQVEGEVQI
VSTAAQTFLATCINGVCWTVYHGAGTRTIASPKGPVIQMYTNVDKDLV
GWPAPQGSRSLTPCTCGSSDLYLVTRHADVIPVRRRGDSRGSLLSPRP
ISYLKGSSGGPLLCPAGHAVGIFRAAVCTRGVAKAVDFIPVESLETTM
RSP
SEQ ID NO: 187, soluble NS3/NS4A, 197 aa
MKKKGSVVIVGRINLSGDTAYAQQTRGEEGCQETSQTGRDKNQVEGEV
QIVSTAAQTFLATCINGVCWTVYHGAGTRTIASPKGPVIQMYTNVDKD
LVGWPAPQGSRSLTPCTCGSSDLYLVTRHADVIPVRRRGDSRGSLLSP
RPISYLKGSSGGPLLCPAGHAVGIFRAAVCTRGVAKAVDFIPVESLET
TMRSP
SEQ ID NO: 188, soluble NS3/NS4A, 197 aa
MKKKGSVVIVGRINLSGDTAYAQQTRGEEGCQETSQTGRDKNQVEGEV
QIVSTATQTFLATCINGVCWTVYHGAGTRTIASPKGPVTQMYTNVDKD
LVGWQAPQGSRSLTPCTCGSSDLYLVTRHADVIPVRRRGDSRGSLLSP
RPISYLKGSSGGPLLCPAGHAVGIFRAAVCTRGVAKAVDFIPVESLET
TMRSP
SEQ ID NO: 189, soluble NS3/NS4A, 197 aa
MKKKGSVVIVGRINLSGDTAYAQQTRGEEGCQETSQTGRDKNQVEGEV
QIVSTATQTFLATSINGVLWTVYHGAGTRTIASPKGPVTQMYTNVDKD
LVGWQAPQGSRSLTPCTCGSSDLYLVTRHADVIPVRRRGDSRGSLLSP
RPISYLKGSSGGPLLCPAGHAVGIFRAAVSTRGVAKAVDFIPVESLET
TMRSP
SEQ ID NO: 190, soluble NS3/NS4A, 197 aa
MKKKGSVVIVGRINLSGDTAYAQQTRGEQGCQKTSHTGRDKNQVEGEV
QIVSTATQTFLATSINGVLWTVYHGAGTRTIASPKGPVTQMYTNVDKD
LVGWQAPQGSRSLTPCTCGSSDLYLVTRHADVIPVRRRGDSRGSLLSP
RPISYLKGSSGGPLLCPAGHAVGIFRAAVSTRGVAKAVDFIPVESLET
TMRSP
SEQ ID NO: 191, soluble NS3/NS4A, 197 aa
MKKKGSVVIVGRINLSGDTAYAQQTRGEQGTQKTSHTGRDKNQVEGEV
QIVSTATQTFLATSINGVLWTVYHGAGTRTIASPKGPVTQMYTNVDKD
LVGWQAPQGSRSLTPCTCGSSDLYLVTRHADVIPVRRRGDSRGSLLSP
RPISYLKGSSGGPLLCPAGHAVGIFRAAVSTRGVAKAVDFIPVESLET
TMRSP
SEQ ID NO: 205, NS3aH1, soluble NS3/NS4A
(S139A), 196 aa
KKKGSVVIVGRINLSGDTAYAQQTRGEEGCQETSQTGRDKNQVEGEVQ
IVSTATQTFLATSINGVLWTVYHGAGTRTIASPKGPVTQMYTNVDKDL
VGWQAPQGSRSLTPCTCGSSDLYLVTRHADVIPVRRRGDSRGSLLSPR
PISYLKGSAGGPLLCPAGHAVGIFRAAVSTRGVAKAVDFIPVESLETT
MRSP

[0386] In some embodiments of any of the aspects, the repressible protease comprises mutations to increase binding affinity for a specific ligand. As a non-limiting example, NS3aH1 (e.g., SEQ ID NO: 205) comprises four mutations needed for interaction with the ANR peptide (e.g., SEQ ID NO: 204): A7S, E13L, 135V and T42S. Accordingly, in some embodiments of any of the aspects, a repressible protease as described herein comprises at least one of the following mutations: A7S, E13L, 135V and T42S, or any combination thereof.

[0387] In several aspects, described herein are CAR polypeptides comprising a degron domain. As used herein, the term “degron domain” refers to a sequence that promotes degradation of an attached protein, e.g., through the proteasome or autophagy-lysosome pathways; in some embodiments of any of the aspects, the terms “degron”, “degradation domain” and “degradation domain” can be used interchangeably with “degron domain”. In some embodiments, a degron domain is a polypeptide that destabilize a protein such that half-life of the protein is reduced at least two-fold, when fused to the protein. As a non-limiting example, an AND-gate CAR polypeptide can comprise a degron domain, as described herein. In some embodiments of any of the aspects, a CAR polypeptide as described herein (or a CAR polypeptide system collectively) comprises 1, 2, 3, 4, 5, or more degron domains. In some embodiments of any of the aspects, the CAR polypeptide or system comprises one degron domain. In embodiments comprising multiple degron domains, the multiple degron domains can be different individual degron domains or multiple copies of the same degron domain, or a combination of the foregoing.

[0388] Many different degron sequences/signals (e.g., of the ubiquitin-proteasome system) have been described, any of which can be used as provided herein. A degron domain may be operably linked to a cell receptor, but need not be contiguous or immediately adjacent with it as long as the degron domain still functions to direct degradation of the cell receptor. In some embodiments, the degron domain induces rapid degradation of the cell receptor. For a discussion of degron domains and their function in protein degradation, see, e.g., Kanemaki et al. (2013) Pflugers Arch. 465(3):419-425, Erales et al. (2014) Biochim Biophys Acta 1843(1):216-221, Schrader et al. (2009) Nat. Chem. Biol. 5(11): 815-822, Ravid et al. (2008) Nat. Rev. Mol. Cell. Biol. 9(9):679-690, Tasaki et al. (2007) Trends Biochem Sci. 32(1 1):520-528, Meinnel et al. (2006) Biol. Chem. 387(7):839-851, Kim et al. (2013) Autophagy 9(7): 1100-1103, Varshavsky (2012) Methods Mol. Biol. 832: 1-11, and Fayadat et al. (2003) Mol Biol Cell. 14(3): 1268-1278; Chassin et al., Nature Communications volume 10, Article number: 2013 (2019); Natsume and Kanemaki Annu Rev Genet. 2017 Nov. 27,51:83-102; the contents of each of which is incorporated herein by reference in its entirety.

[0389] In some embodiments of any of the aspects, the degron domain comprises a ubiquitin tag, including but not limited to: UbR, UbP, UbW, UbH, UbI, UbK, UbQ, UbV, UbL, UbD, UbN, UbG, UbY, UbT, UbS, UbF, UbA, UbC, UbE, UbM, 3×UbVR, 3×UbVV, 2×UbVR, 2×UbVV, UbAR, UbVV, UbVR, UbAV, 2×UbAR, 2×UbAV. In some embodiments of any of the aspects, the degron domain comprises a self-excising degron, which refers to a complex comprising a repressible protease, a protease cleavage site, and a degron domain. In some embodiments of any of the aspects, the degron domain is a conditional degron domain, wherein the degradation is induced by ligands (e.g., a degron stabilizer) or another input such as temperature shift or a specific wave length of light. Non-limiting examples of conditional degron domains include the eDHFR degron (e.g., TMP inducer); FKBP12 (e.g., rapamycin analog inducer); temperature-sensitive dihydrofolate reductase (R-DHFRts, or ts-DHFR); a modified version of R-DHFRts termed the low-temperature degron (lt-degron); auxin-inducible degradation (AID); HaloTag-Hydrophobic Tag, HaloPROTAC, and dTAG system (e.g., HyT13 or HyT36 inducer); photosensitive degron (PSD); blue-light-inducible degron (B-LID); tobacco etch virus (TEV) protease-induced protein inactivation (TIPI)-degron system; deGradFP (degrade green fluorescent protein; e.g., induced by NSlmb-vhhGFP expression); or split ubiquitin for the rescue of function (SURF; e.g., induced by rapamycin).

[0390] In some embodiments of any of the aspects, the degron domain comprises a destabilizing domain (DD). Proteins comprising a destabilizing domain are destabilized and constitutively degraded. In some embodiments of any of the aspects, the destabilizing domain of a degron domain can bind to a degron stabilizer, such that destabilizing degron domain is not active and no longer promotes the degradation of the attached protein. The system is reversible and when the degron stabilizer is withdrawn, the protein is degraded again. In some embodiments of any of the aspects, a CAR polypeptide is bound to a degron stabilizer bound to the degron domain. In some embodiments of any of the aspects, the CAR polypeptide is bound specifically to a degron stabilizer bound to the degron domain.

[0391] In some embodiments of any of the aspects, the CAR polypeptide is in combination with 1, 2, 3, 4, 5, or more degron stabilizers. In some embodiments of any of the aspects, the CAR polypeptide is in combination with one degron stabilizer. In embodiments comprising multiple degron stabilizers, the multiple degron stabilizers can be different individual degron stabilizers or multiple copies of the same degron stabilizer, or a combination of the foregoing.

[0392] In some embodiments of any of the aspects, the degron domain is the E. coli dihydrofolate reductase (eDHFR) degron. The eDHFR degron permits extensive depletion of exogenously expressed proteins in mammalian cells and C. elegans. The eDHFR degron is stabilized by tight binding to the antibiotic and degron stabilizer trimethoprim (TMP), shown below, which is innocuous in eukaryotic cells.

[chemical structure]

[0393] Proteins tagged with eDHFR are constitutively degraded unless the cells are exposed to TMP. The level of tagged protein can be directly controlled by modulating the TMP concentration in the growth medium. Unlike shRNA methods this degron-based strategy is advantageous since depletion kinetics are not limited by the natural protein half-life, which allows for more rapid knockdown of stable proteins. TMP stabilizes the DD-target protein fusion in a dose-dependent manner up to 100-fold, which gives the system a substantial dynamic range. The ligand TMP works by itself and does not require dimerization with a second protein. This system is so effective that it can control the levels of transmembrane proteins, such as the CAR polypeptides described herein; see e.g., Schrader et al., Chem Biol. 2010 Sep. 24, 17(9): 917-918; Ryan M. Sheridan and David L. Bentley, Biotechniques. 2016, 60(2): 69-74.

[0394] In some embodiments of any of the aspects, the degron domain comprises an amino acid sequence derived from an FK506- and rapamycin-binding protein (FKBP12) (UniProtKB—P62942 (FKB 1A_HUMAN), incorporated herein by reference), or a variant thereof. In some embodiments of any of the aspects, the FKBP12 derived amino acid sequence comprises a mutation of the phenylalanine (F) at amino acid position 36 (as counted without the methionine) to valine (V) (F36V) (also referred to as FKBP12* or FKBP*). In some embodiments of any of the aspects, the degron stabilizer is a rapamycin analog, such as Sheild-1, shown below. See e.g., Banaszynski et al., Cell. 2006 Sep. 8; 126(5): 995-1004; US Patent Application US20180179522; U.S. Pat. No. 10,137,180; the content of each of which is incorporated herein by reference in its entirety.

[chemical structure]

[0395] In some embodiments of any of the aspects, the degron domain of a CAR polypeptide as described herein comprises SEQ ID NOs: 59, 262, or an amino acid sequence that is at least 70%, at least 75%, at least 80%, at least 85%, at least 90%, at least 90%, at least 91%, at least 92%, at least 93%, at least 94%, at least 95%, at least 96%, at least 97%, at least 98%, or at least 99% identical to the sequence of SEQ ID NOs: 59 or 262 that maintains the same functions as SEQ ID NOs: 59 or 262 (e.g., degradation, binding to TMP or Shield-1). In some embodiments of any of the aspects, the degron domain of a CAR polypeptide as described herein comprises SEQ ID NOs: 59 or 262 or an amino acid sequence that is at least 95% identical to the sequence of SEQ ID NOs: 59 or 262 that maintains the same functions as SEQ ID NOs: 59 or 262 (e.g., degradation, binding to TMP or Shield-1).

[0396] In some embodiments of any of the aspects, the degron domain of a CAR polypeptide as described herein is encoded by a nucleic acid sequence comprising SEQ ID NO: 26 or a sequence that is at least 70%, at least 75%, at least 80%, at least 85%, at least 90%, at least 90%, at least 91%, at least 92%, at least 93%, at least 94%, at least 95%, at least 96%, at least 97%, at least 98%, or at least 99% identical to SEQ ID NO: 26 that maintains the same function or a codon-optimized version of SEQ ID NO: 26. In some embodiments of any of the aspects, the degron domain of a CAR polypeptide as described herein is encoded by a nucleic acid sequence comprising SEQ ID NO: 26 or a sequence that is at least 95% identical to SEQ ID NO: 26 that maintains the same function.

SEQ ID NO: 26, DHFR (V19A), 474 nt
ATCAGTCTGATTGCGGCGTTAGCGGTAGATTACGTTATCGGCATGGAA
AACGCCATGCCGTGGAACCTGCCTGCCGATCTCGCCTGGTTTAAACGC
AACACCTTAAATAAACCCGTGATTATGGGCCGCCATACCTGGGAATCA
ATCGGTCGTCCGTTGCCAGGACGCAAAAATATTATCCTCAGCAGTCAA
CCGAGTACGGACGATCGCGTAACGTGGGTGAAGTCGGTGGATGAAGCC
ATCGCGGCGTGTGGTGACGTACCAGAAATCATGGTGATTGGCGGCGGT
CGCGTTATTGAACAGTTCTTGCCAAAAGCGCAAAAACTGTATCTGACG
CATATCGACGCAGAAGTGGAAGGCGACACCCATTTCCCGGATTACGAG
CCGGATGACTGGGAATCGGTATTCAGCGAGTTCCACGATGCTGATGCG
CAGAACTCTCACAGCTATTGCTTTGAGATTCTGGAGCGGCGA
SEQ ID NO: 59, DHFR (V19A), 158 aa,
ISLIAALAVDYVIGMENAMPWNLPADLAWFKRNTLNKPVIMGRHTWES
IGRPLPGRKNIILSSQPSTDDRVTWVKSVDEAIAACGDVPEIMVIGGG
RVIEQFLPKAQKLYLTHIDAEVEGDTHFPDYEPDDWESVFSEFHDADA
QNSHSYCFEILERR
SEQ ID NO: 262, FK506- and rapamycin-binding
protein (FKBP), 107 aa
GVQVETISPGDGRTFPKRGQTCVVHYTGMLEDGKKFDSSRDRNKPFKF
MLGKQEVIRGWEEGVAQMSVGQRAKLTISPDYAYGATGHPGIIPPHAT
LVFDVELLKLE

[0397] In some embodiments of any of the aspects, the destabilizing degron domain comprises at least one mutation that causes almost complete removal or degradation of the CAR polypeptide. Non-limiting examples of DHFR (e.g., SEQ ID NO: 59) mutations include: V19A, Y100I, G121V, H12Y, H12L, R98H, F103S, M42T, H114R, 161F, T68S, H12Y/Y100I, H12L/Y100I, R98H/F103S, M42T/H114R, and I61F/T68S, or any combinations thereof, see e.g., U.S. Pat. No. 8,173,792, the content of which is incorporated herein by reference in its entirety.

[0398] In some embodiments of any of the aspects, the degron domain comprises a ligand-induced degradation (LID) domain. Proteins comprising a LID domain are destabilized and degraded in the presence of a degron destabilizer. In some embodiments of any of the aspects, the LID domain of a degron domain can bind to a degron destabilizer, promoting the degradation of the attached protein. The system is reversible and when the degron destabilizer is withdrawn, the protein is not destabilized and/or not degraded. In some embodiments of any of the aspects, a CAR polypeptide is bound to a degron destabilizer bound to the degron domain. In some embodiments of any of the aspects, the CAR polypeptide is bound specifically to a degron destabilizer bound to the degron domain.

[0399] In some embodiments of any of the aspects, the CAR polypeptide is in combination with 1, 2, 3, 4, 5, or more degron destabilizers. In some embodiments of any of the aspects, the CAR polypeptide is in combination with one degron destabilizer. In embodiments comprising multiple degron destabilizers, the multiple degron destabilizers can be different individual degron destabilizers or multiple copies of the same degron stabilizer, or a combination of the foregoing.

[0400] In some embodiments of any of the aspects, the LID degron domain comprises the FK506- and rapamycin-binding protein (FKBP), further comprising a degron fused to the C terminus of FKBP, e.g., with an intervening linker such as the 10-amino acid linker (Gly4SerGly4Ser) or another linker as described herein. In some embodiments of any of the aspects, the degron fused to the C terminus of FKBP (e.g., SEQ ID NO: 262) comprises the 19 amino acid sequence: TRGVEEVAEGVVLLRRRGN (SEQ ID NO: 263), or a sequence that is at least 95% identical that maintains the same function. In the absence of the small molecule Shield-1, the 19-aa degron is bound to the FKBP fusion protein, and the protein is stable. When present, Shield-1 binds tightly to FKBP, displacing the 19-aa degron and inducing rapid and processive degradation of the LID domain and any fused partner protein. In some embodiments of any of the aspects, the degron destabilizer is Sheild-1, shown above, or an analog thereof, see e.g., Bonger et al., Nat Chem Biol. 2011 Jul. 3; 7(8):531-7.

[0401] In several aspects, described herein are CAR polypeptides comprising a peptide domain. As used herein, the term “peptide domain” refers to a short polypeptide domain that can specifically bind to a repressible protease as described herein (e.g., NS3 protease). The peptide domain can also be referred to herein as a “protease-binding domain”. In some embodiments of any of the aspects, any peptide that can bind to the repressible protease can be used. In some embodiments of any of the aspects, the peptide domain comprises a protease cleavage site as described herein and is a substrate peptidomimetic. In some embodiments of any of the aspects, the peptide domain is specifically bound by but not cleaved by the repressible protease. As a non-limiting example, an OFF-switch CAR polypeptide as described herein can comprise a peptide domain. In some embodiments of any of the aspects, a CAR polypeptide as described herein (or a CAR polypeptide system collectively) comprises 1, 2, 3, 4, 5, or more peptide domains. In some embodiments of any of the aspects, the CAR polypeptide or system comprises one peptide domain. In embodiments comprising multiple peptide domains, the multiple peptide domains can be different individual peptide domains or multiple copies of the same peptide domain, or a combination of the foregoing.

[0402] Table 17 lists non-limiting examples of peptide domains (e.g., for NS3 protease). Such inhibitory peptides cap the active site and bind via a “tyrosine” finger at an alternative NS3-4A site. The peptides are not cleaved due to a combination of geometrical constraints and impairment of the oxyanion hole function. Negligible susceptibility to known (e.g., A156V and R155K) resistance mutations of the NS3-4A protease have been observed. Accordingly, non-limiting examples of peptide domains include: K5-66, K5-66-A, K5-66-B, K6-10, K6-10A, K6-10B K5-66-R, CP5-46, CP5-46-4D5E, CP5-46-A, CP5- 46A-4D5E, Ant-CP5-46A-4D5E, and apo NS3a reader (ANR) peptides (see e.g., Kugler et al., High Affinity Peptide Inhibitors of the Hepatitis C Virus NS3-4A Protease Refractory to Common Resistant Mutants, J Biol Chem. 2012 Nov. 9; 287(46): 39224-39232; Cunningham-Bryant et al., J Am Chem Soc. 2019 Feb. 27; 141(8):3352-3355).

TABLE 17
Exemplary Peptide Domains

| SEQ ID NO: | Peptide | Sequence |
|---|---|---|
| 192 | K5-66 | GELGRLVYLLDGPGYDPIHC |
| | | SLAYGDASTLVVF |
| 193 | K5-66-A | GELGRLVYLLDGPGYDPI |
| 194 | K5-66-B | HCSLAYGDASTLVVF |
| 195 | K6-10 | GELGRPVYVLGDPGYYATHC |
| | | IYATTNDALIFSV |
| 196 | K6-10-A | GELGRPVYVLGDPGYYAT |
| 197 | K6-10-B | HCIYATTNDALIFSV |
| 198 | K5-66-R | GELGRIPSDTYDLAVGALH |
| | | CPFYLVSGLVYLDG |
| 199 | CPS-46 | GELGRLVYLLDGPGYDPIHC |
| | | DVVTRGGSHLFNF |
| 200 | CP5-46-4D5E | GELDELVYLLDGPGYDPIHC |
| | | DVVTRGGSHLFNF |
| 201 | CPS-46-A | GELGRLVYLLDGPGYDPIHCD |
| 202 | CP5-46A-4D5E | GELDELVYLLDGPGYDPIHS |
| 203 | Ant-CPS-46A-4D5E | RQIK IWFQNRRMKWKKGEL |
| | | DELVYLLDGPGYDPIHS |
| 204 | ANR | GELDELVYLLDGPGYDPIHSD |

[0403] In some embodiments of any of the aspects, the peptide domain of a CAR polypeptide as described herein comprises SEQ ID NOs: 95, 192-204, or an amino acid sequence that is at least 70%, at least 75%, at least 80%, at least 85%, at least 90%, at least 90%, at least 91%, at least 92%, at least 93%, at least 94%, at least 95%, at least 96%, at least 97%, at least 98%, or at least 99% identical to the sequence of one of SEQ ID NOs: 95, 192-204, that maintains the same functions as one of SEQ ID NOs: 95, 192-204 (e.g., binding to a repressible protease). In some embodiments of any of the aspects, the peptide domain of a CAR polypeptide as described herein comprises SEQ ID NOs: 95, 192-204, or an amino acid sequence that is at least 95% identical to the sequence of one of SEQ ID NOs: 95, 192-204, that maintains the same functions as one of SEQ ID NOs: 95, 192-204.

[0404] In some embodiments of any of the aspects, the peptide domain of a CAR polypeptide as described herein is encoded by a nucleic acid sequence comprising SEQ ID NO: 71 or a sequence that is at least 70%, at least 75%, at least 80%, at least 85%, at least 90%, at least 90%, at least 91%, at least 92%, at least 93%, at least 94%, at least 95%, at least 96%, at least 97%, at least 98%, or at least 99% identical to SEQ ID NO: 71 that maintains the same function or a codon-optimized version of SEQ ID NO: 71. In some embodiments of any of the aspects, the peptide domain of a CAR polypeptide as described herein is encoded by a nucleic acid sequence comprising SEQ ID NO: 71 or a sequence that is at least 95% identical to SEQ ID NO: 71 that maintains the same function.

SEQ ID NO: 71, CP5-46-5D5E, 99 nt
GGAGAACTTGATGAATTGGTATACTTACTAGATGGGCCAGGTTATGAC
CCTATACATTGCGATGTAGTGACAAGGGGCGGCAGCCACCTTTTCAAT
TTT
SEQ ID NO: 95, CP5-46-5D5E, 33 aa:
GELDELVYLLDGPGYDPIHCDVVTRGGSHLFNF

[0405] In some embodiments of any of the aspects, a peptide domain is specific for a certain genotype of repressible protease. As a non-limiting example, the peptide ANR (e.g., SEQ ID NO: 204) was selected to interact with genotype 1b NS3a (e.g., SEQ ID NO: 99) or an NS3 comprising the following mutations: A7S, E13L, I135V and T42S (e.g., SEQ ID NO: 205). Apo NS3a reader (ANR) forms a basal complex with NS3a-genotype 1b with an affinity of 10 nM, which is disrupted by NS3a-targeting drugs. Accordingly, described herein are systems comprising a peptide domain (e.g., SEQ ID NO: 95, 192-204) and a repressible protease (e.g., SEQ ID NO: 99, 205).

[0406] In several aspects, described herein are CAR polypeptides comprising a reader domain (e.g., reader CAR polypeptides as described herein). As used herein, the term “reader domain” refers to a polypeptide sequence that specifically binds to a repressible protease as described herein in the presence of a specific protease inhibitor. As a non-limiting example, a reader CAR polypeptide as described herein can comprise a reader domain. In some embodiments of any of the aspects, a CAR polypeptide as described herein (or a CAR polypeptide system collectively) comprises 1, 2, 3, 4, 5, or more reader domains. In some embodiments of any of the aspects, the CAR polypeptide or system comprises one reader domain. In embodiments comprising multiple reader domains, the multiple reader domains can be different individual reader domains or multiple copies of the same reader domain, or a combination of the foregoing.

[0407] In some embodiments of any of the aspects, a CAR polypeptide as described herein comprises a reader domain that recognizes a specific inhibitor-bound state of the HCV NS3 repressible protease. As a non-limiting example, the reader domain can specifically bind to at least one of the following protease inhibitors: grazoprevir, danoprevir, simeprevir, asunaprevir, ciluprevir, boceprevir, sovaprevir, paritaprevir, ombitasvir, paritaprevir, ritonavir, dasabuvir, telaprevir, or a protease inhibitor selected from Table 16. In some embodiments of any of the aspects, the reader domain comprises the scaffold of leucine-rich repeat proteins (LRRs), designed helical repeat proteins (DHRs), ferredoxins and/or helical bundles, that has been designed to specifically bind to a specific protease inhibitor in combination with a repressible protease; see e.g., Foight et al., Nat Biotechnol. 2019 October; 37(10):1209-1216, the content of which is incorporated herein by reference in its entirety. In some embodiments of any of the aspects, the CAR polypeptide is bound to a protease inhibitor bound to the reader domain. In some embodiments of any of the aspects, the CAR polypeptide is bound specifically to a protease inhibitor bound to the reader domain.

[0408] In some embodiments of any of the aspects, the CAR polypeptide comprising a reader domain is in combination with 1, 2, 3, 4, 5, or more protease inhibitors. In some embodiments of any of the aspects, the CAR polypeptide comprising a reader domain is in combination with one protease inhibitor. In embodiments comprising multiple protease inhibitors, the multiple protease inhibitors can be different individual protease inhibitors or multiple copies of the same protease inhibitor, or a combination of the foregoing.

[0409] In some embodiments of any of the aspects, the reader domain comprises a danoprevir/NS3 complex reader (DNCR). Non-limiting examples of DNCRs include D3, DNCR1, and DNCR2. In some embodiments of any of the aspects, the reader domain comprises DNCR2 (e.g., SEQ ID NO: 101), which has an affinity for the NS3a/danoprevir complex of 36 pM, and no detectable binding to apo NS3a and >20,000-fold selectivity over NS3a bound to the drugs grazoprevir or asunaprevir. DNCR2 does not bind substantially to free danoprevir. DNCR2/danoprevir/NS3a forms a 1:1:1 complex.

[0410] In some embodiments of any of the aspects, the reader domain comprises a grazoprevir/NS3 complex reader (GNCR). Non-limiting examples of GNCRs include GNCR1 and G3. In some embodiments of any of the aspects, the reader domain comprises GNCR1 (e.g., SEQ ID NO: 105), which demonstrates an affinity for the grazoprevir/NS3a complex of 140 nM and little to no affinity for apo, danoprevir-bound or asunaprevir-bound NS3a.

[0411] In some embodiments of any of the aspects, the reader domain comprises D5 (e.g., SEQ ID NO: 206), which demonstrates moderate binding of NS3 in the presence of danoprevir or grazoprevir and some binding of NS3 in the presence of asunaprevir. In some embodiments of any of the aspects, the reader domain comprises DNCR1 (e.g., SEQ ID NO: 207), which demonstrates high binding of NS3 in the presence of danoprevir and minimal binding of NS3 in the presence of asunaprevir or grazoprevir. In some embodiments of any of the aspects, the reader domain comprises G5 (e.g., SEQ ID NO: 208), which demonstrates moderate binding of NS3 in the presence of grazoprevir, some binding of NS3 in the presence of asunaprevir, and no binding to NS3 in the presence of danoprevir. In some embodiments of any of the aspects, the reader domain comprises a asunaprevir/NS3 complex reader, including but not limited to D5 and G3.

[0412] In some embodiments of any of the aspects, the reader domain of a CAR polypeptide as described herein comprises SEQ ID NOs: 101, 105, 206-208, or an amino acid sequence that is at least 70%, at least 75%, at least 80%, at least 85%, at least 90%, at least 90%, at least 91%, at least 92%, at least 93%, at least 94%, at least 95%, at least 96%, at least 97%, at least 98%, or at least 99% identical to the sequence of one of SEQ ID NOs: 101, 105, or 206-208 that maintains the same functions as one of SEQ ID NOs: 101, 105, or 206-208 (e.g., binding to a repressible protease in the presence of a specific protease inhibitor). In some embodiments of any of the aspects, the reader domain of a CAR polypeptide as described herein comprises SEQ ID NOs: 101, 105, 206-208, or an amino acid sequence that is at least 95% identical to the sequence of one of SEQ ID NOs: 101, 105, or 206-208 that maintains the same functions as one of SEQ ID NOs: 101, 105, or 206-208.

[0413] In some embodiments of any of the aspects, the reader domain of a CAR polypeptide as described herein is encoded by a nucleic sequence comprising SEQ ID NO: 77, 81 or a sequence that is at least 70%, at least 75%, at least 80%, at least 85%, at least 90%, at least 90%, at least 91%, at least 92%, at least 93%, at least 94%, at least 95%, at least 96%, at least 97%, at least 98%, or at least 99% identical to SEQ ID NOs: 77 or 81 that maintains the same function or a codon-optimized version of SEQ ID NOs: 77 or 81. In some embodiments of any of the aspects, the reader domain of a CAR polypeptide as described herein is encoded by a nucleic sequence comprising SEQ ID NOs: 77, 81 or a sequence that is at least 95% identical to SEQ ID NOs: 77 or 81 that maintains the same function.

SEQ ID NO: 77, DNCR2, 687 nt
TCTTCCGACGAAGAAGAAGCGCGCGAGCTGATCGAGCGTGCGAAGGAG
GCTGCGGAACGCGCGCAAGAAGCTGCTGAGCGTACCGGTGATCCGCGC
GTGCGTGAACTCGCTCGTGAGCTGAAACGCCTGGCTCAGGAAGCTGCT
GAAGAAGTGAAGCGTGACCCGTCTTCCTCCGATGTGAACGAAGCGCTC
AAACTCATCGTGGAAGCTATCGAGGCGGCTGTGGACGCGCTCGAAGCG
GCTGAACGCACCGGCGACCCGGAGGTTCGTGAGCTGGCGCGTGAGCTC
GTGCGCCTCGCGGTTGAGGCTGCGGAGGAGGTGCAACGTAACCCATCC
TCCTCTGACGTGAATGAGGCTCTCCACAGCATAGTTTACGCTATTGAA
GCTGCCATTTTTGCATTGGAAGCTGCCGAAAGGACTGGTGACCCGGAA
GTGAGAGAACTCGCCCGAGAGCTTGTAAGACTGGCGGTTGAGGCGGCT
GAAGAAGTCCAGCGAAATCCGTCCAGCCGGAATGTCGAGCACGCACTG
ATGAGGATTGTGTTGGCCATTTACCTGGCAGAAGAAAATCTCCGCGAA
GCTGAGGAGTCTGGCGATCCGGAAAAACGTGAAAAGGCTCGCGAACGT
GTTCGTGAGGCGGTGGAACGTGCGGAAGAGGTTCAGCGTGATCCATCC
GGTTGGCTGAATCAT
SEQ ID NO: 81, GNCR1, 699 nt
GATATCGAGAAGCTTTGCAAAAAAGCTGAAGAAGAGGCAAAGGAGGCG
CAAGAGAAAGCTGATGAGTTGCGGCAACGGCACCCCGACAGCCAGGCT
GCTGAGGATGCTGAGGACTTGGCAAATCTGGCGGTGGCCGCTGTCTTG
ACGGCTTGCTTGTTGGCCCAAGAACATCCAAACGCTGACATTGCAAAG
CTTTGCATTAAGGCCGCGTCCGAAGCGGCTGAAGCAGCTTCTAAGGCA
GCCGAGCTGGCGCAACGGCATCCTGACTCCCAAGCGGCGAGGGACGCT
ATAAAACTCGCATCACAAGCAGCCAGAGCTGTAATCCTCGCTATTATG
CTCGCAGCCGAAAACCCAAACGCTGATATTGCCAAACTGTGTATAAAG
GCGGCTAGTGAAGCCGCAGAAGCTGCAAGCAAAGCAGCAGAACTTGCC
CAACGCCACCCCGACTCCCAGGCGGCTAGAGATGCTATAAAACTTGCT
TCTCAGGCTGCGGAGGCGGTAGAACGAGCGATCTGGCTGGCAGCAGAG
AACCCCAACGCTGACATTGCCAAAAAGTGTATCAAGGCGGCTTCCGAA
GCCGCCGAGGAGGCCAGCAAAGCGGCGGAAGAGGCACAGAGACATCCG
GACTCACAGAAAGCACGCGACGAGATTAAAGAGGCTAGTCAAAAAGCA
GAGGAGGTAAAAGAACGCTGTAAGTCC
SEQ ID NO: 101, DNCR2, 229 aa
SSDEEEARELIERAKEAAERAQEAAERTGDPRVRELARELKRLAQEAA
EEVKRDPSSSDVNEALKLIVEAIEAAVDALEAAERTGDPEVRELAREL
VRLAVEAAEEVQRNPSSSDVNEALHSIVYAIEAAIFALEAAERTGDPE
VRELARELVRLAVEAAEEVQRNPSSRNVEHALMRIVLAIYLAEENLRE
AEESGDPEKREKARERVREAVERAEEVQRDPSGWLNH
SEQ ID NO: 105, GNCR1, 233 aa:
DIEKLCKKAEEEAKEAQEKADELRQRHPDSQAAEDAEDLANLAVAAVL
TACLLAQEHPNADIAKLCIKAASEAAEAASKAAELAQRHPDSQAARDA
IKLASQAARAVILAIMLAAENPNADIAKLCIKAASEAAEAASKAAELA
QRHPDSQAARDAIKLASQAAEAVERAIWLAAENPNADIAKKCIKAASE
AAEEASKAAEEAQRHPDSQKARDEIKEASQKAEEVKERCKS
SEQ ID NO: 206, D5, 229 aa
SSDEEEARELIERAKEAAERAQEAAERTGDPRVRELARELKRLAQEAA
EEVKRDPSSSDVNEALKLIVEAIEAAVDALEAAERTGDPEVRELAREL
VRLAVEAAEEVQRNPSSSDVNEALLTIVIAIEAAVNALEAAERTGDPE
VRELARELVRLAVEAAEEVQRNPSSREVNIALWKIVLAIQEAVESLRE
AEESGDPEKREKARERVREAVERAEEVQRDPSGWLNH
SEQ ID NO: 207, DNCR1, 229 aa
SSDEEEARELIERAKEAAERAQEAAERTGDPRVRELARELKRLAQEAA
EEVKRDPSSSDVNEALKLIVEAIEAAVDALEAAERTGDPEVRELAREL
VRLAVEAAEEVQRNPSSSDVNEALLSIVIAIEAAVHALEAAERTGDPE
VRELARELVRLAVEAAEEVQRNPSSREVEHALMKIVLAIYEAEESLRE
AEESGDPEKREKARERVREAVERAEEVQRDPSGWLNH
SEQ ID NO: 208, G3, 233 aa
DIEKLCKKAEEEAKEAQEKADELRQRHPDSQAAEDAEDLANEAEAAVL
AACSLAQEHPNADIAKLCIKAASEAAEAASKAAELAQRHPDSQAARDA
IKLASQAARAVILAIMLAAENPNADIAKLCIKAASEAAEAASKAAELA
QRHPDSQAARDAIKLASQAAEAVERAIWLAAENPNADIAKKCIKAASE
AAEEASKAAEEAQRHPDSQKARDEIKEASQKAEEVKERCKS

[0414] In some embodiments of any of the aspects, a CAR polypeptide as described herein comprises a linker domain adjacent (e.g., N-terminal and/or C-terminal) to the reader domain. In some embodiments of any of the aspects, the reader domain linker comprises SEQ ID NO: 104 or an amino acid sequence that is at least 70%, at least 75%, at least 80%, at least 85%, at least 90%, at least 90%, at least 91%, at least 92%, at least 93%, at least 94%, at least 95%, at least 96%, at least 97%, at least 98%, or at least 99% identical to the sequence of SEQ ID NO: 104. In some embodiments of any of the aspects, the reader domain linker is encoded by SEQ ID NO: 80, or a sequence that is at least 70%, at least 75%, at least 80%, at least 85%, at least 90%, at least 90%, at least 91%, at least 92%, at least 93%, at least 94%, at least 95%, at least 96%, at least 97%, at least 98%, or at least 99% identical to SEQ ID NO: 80 or a codon-optimized version thereof.

[0415] In several aspects, described herein are CAR polypeptides comprising a self-cleaving peptide. As used herein, the term “self-cleaving peptide” refers to a short amino acid sequence (e.g., approximately 18-22 aa-long peptides) that can catalyze its own cleavage. In some embodiments of any of the aspects, a multi-component CAR system as described herein (e.g., AND-gate CAR system, OFF-switch CAR system, reader CAR system) comprises at least two polypeptides that are physically linked to one another through a self-cleaving peptide domain. The self-cleaving peptide allows the nucleic acids of the first polypeptide and second polypeptide (and/or third polypeptide, etc.) to be present in the same vector, but after translation the self-cleaving peptide cleaves the translated polypeptide into the multiple separate polypeptides.

[0416] In some embodiments of any of the aspects, a CAR polypeptide as described herein (or a CAR polypeptide system collectively) comprises 1, 2, 3, 4, 5, or more self-cleaving peptides, e.g., in between each CAR polypeptide. In some embodiments of any of the aspects, the CAR polypeptide or system comprises one self-cleaving peptide, e.g., in between a first polypeptide and a second polypeptide of a CAR polypeptide system. In embodiments comprising multiple self-cleaving peptides, the multiple self-cleaving peptides can be different individual self-cleaving peptides or multiple copies of the same self-cleaving peptide, or a combination of the foregoing.

[0417] In some embodiments of any of the aspects, the self-cleaving peptide belongs to the 2A peptide family. Non-limiting examples of 2A peptides include P2A, E2A, F2A and T2A (see e.g., Table 18). F2A is derived from foot-and-mouth disease virus 18; E2A is derived from equine rhinitis A virus; P2A is derived from porcine teschovirus-1 2A; T2A is derived from those a asigna virus 2A. In some embodiments of any of the aspects, the N-terminal of the 2A peptide comprises the sequence “GSG” (Gly-Ser-Gly). In some embodiments of any of the aspects, the N-terminal of the 2A peptide does not comprise the sequence “GSG” (Gly-Ser-Gly).

TABLE 18
Exemplary Self-Cleaving Peptides

| SEQ ID NO: | Name | Sequence |
|---|---|---|
| 209 | T2A | (GSG)EGRGSLLTCGDVEENPGP |
| 210 | P2A | (GSG)ATNFSLLKQAGDVEENPGP |
| 211 | E2A | (GSG)QCTNYALLKLAGDVESNPGP |
| 212 | F2A | (GSG)VKQTLNFDLLKLAGDVESNPGP |

[0418] The 2A-peptide-mediated cleavage commences after protein translation. The cleavage is triggered by breaking of peptide bond between the Proline (P) and Glycine (G) in the C-terminal of the 2A peptide. The molecular mechanism of 2A-peptide-mediated cleavage involves ribosomal “skipping” of glycyl-prolyl peptide bond formation rather than true proteolytic cleavage. Different 2A peptides have different efficiencies of self-cleaving, with P2A being the most efficient and F2A the least efficient. Therefore, up to 50% of F2A-linked proteins can remain in the cell as a fusion protein.

[0419] In some embodiments of any of the aspects, the self-cleaving peptide of a CAR polypeptide system as described herein comprises SEQ ID NOs: 102, 123, 209-212, or an amino acid sequence that is at least 70%, at least 75%, at least 80%, at least 85%, at least 90%, at least 90%, at least 91%, at least 92%, at least 93%, at least 94%, at least 95%, at least 96%, at least 97%, at least 98%, or at least 99% identical to the sequence of one of SEQ ID NOs: 102, 123, 209-212, that maintains the same functions as one of SEQ ID NOs: 102, 123, 209-212 (e.g., self-cleavage). In some embodiments of any of the aspects, the self-cleaving peptide of a CAR polypeptide system as described herein comprises SEQ ID NOs: 102, 123, 209-212, or an amino acid sequence that is at least 95% identical to the sequence of one of SEQ ID NOs: 102, 123, 209-212, that maintains the same function.

[0420] In some embodiments of any of the aspects, the self-cleaving peptide of a CAR polypeptide system as described herein is encoded by a nucleic acid sequence comprising SEQ ID NOs: 78, 122 or a nucleic acid sequence that is at least 70%, at least 75%, at least 80%, at least 85%, at least 90%, at least 90%, at least 91%, at least 92%, at least 93%, at least 94%, at least 95%, at least 96%, at least 97%, at least 98%, or at least 99% identical to one of SEQ ID NOs: 78 or 122 that maintains the same function or a codon-optimized version of one of SEQ ID NOs: 78 or 122. In some embodiments of any of the aspects, the self-cleaving peptide of a CAR polypeptide system as described herein is encoded by a nucleic acid sequence comprising SEQ ID NOs: 78, 122 or a nucleic acid sequence that is at least 95% identical to one of SEQ ID NOs: 78 or 122 that maintains the same function.

[0421] In some embodiments of any of the aspects, providing the multiple polypeptides of the CAR systems as described herein in a 1:1 (or 1:1:1, etc.) stoichiometric ratio is advantageous (e.g., this stoichiometric ratio results in optimal functionality). In embodiments where a 1:1 (or 1:1:1, etc.) ratio of the first and second (and third etc.) polypeptides of a CAR system is advantageous, then the first and second polypeptides can be provided in a single vector, flanking a self-cleaving peptide(s) as described herein. In embodiments where a 1:1 (or 1:1:1, etc.) ratio of the first and second (and third etc.) polypeptides of a CAR system is not advantageous (e.g., this stoichiometric ratio results in suboptimal functionality, and other ratios result in optimal functionality) then the first and second polypeptides can be provided in multiple separate vectors, e.g., at the desired stoichiometric ratios.

[0422] In some embodiments of any of the aspects, CAR polypeptides as described herein comprise a leading peptide, which can also be referred to as a leader sequence or a leader peptide or simply “leader”. As used herein, the term “leading peptide” refers to an amino-terminal sequence comprising or consisting of a signal peptide and an optional secretion leader pro-peptide. The signal peptide typically consists of 13 to 36 rather hydrophobic amino acids. Signal peptides have a common structure: a short, positively charged amino-terminal region (n-region); a central hydrophobic region (h-region); and a more polar carboxy-terminal region (c-region) containing the site that is cleaved by the signal peptidase. On the ER luminal side, the signal peptide is cleaved off by a signal peptidase. After successful folding of the nascent polypeptide by ER resident chaperones and foldases, the protein is further directed to exit the ER. This process may be supported by the presence of an N-terminal pro-sequence.

[0423] In some embodiments of any of the aspects, a CAR polypeptide as described herein (or a CAR polypeptide system collectively) comprises 1, 2, 3, 4, 5, or more leading peptides, e.g., preceding each extracellular binding domain or each extracellular domain. In some embodiments of any of the aspects, the CAR polypeptide or system comprises one leading peptide. In some embodiments of any of the aspects, the CAR polypeptide or system comprises two leading peptides. In embodiments comprising multiple leading peptides, the multiple leading peptides can be different individual leading peptides or multiple copies of the same leading peptide, or a combination of the foregoing.

[0424] In some embodiments of any of the aspects, the leading peptide is a CD8a leading peptide. In some embodiments of any of the aspects, the leading peptide comprises SEQ ID NO: 40, or an amino acid sequence that is at least 70%, at least 75%, at least 80%, at least 85%, at least 90%, at least 90%, at least 91%, at least 92%, at least 93%, at least 94%, at least 95%, at least 96%, at least 97%, at least 98%, or at least 99% identical to the sequence of SEQ ID NO: 40 that maintains the same functions as SEQ ID NO: 40. In some embodiments of any of the aspects, the leading peptide of a CAR polypeptide as described herein comprises SEQ ID NO: 40, or an amino acid sequence that is at least 95% identical to the sequence of SEQ ID NO: 40 that maintains the same function.

[0425] In some embodiments, the leading peptide of a CAR polypeptide as described herein is encoded by a nucleic acid sequence comprising SEQ ID NO: 7 or a sequence that is at least 70%, at least 75%, at least 80%, at least 85%, at least 90%, at least 90%, at least 91%, at least 92%, at least 93%, at least 94%, at least 95%, at least 96%, at least 97%, at least 98%, or at least 99% identical to SEQ ID NO: 7 that maintains the same function or a codon-optimized version of SEQ ID NO: 7. In some embodiments, the leading peptide of a CAR polypeptide as described herein is encoded by a nucleic acid sequence comprising SEQ ID NO: 7 or a sequence that is at least 95% identical to SEQ ID NO: 7 that maintains the same function.

[0426] In some embodiments of any of the aspects, a CAR polypeptide as described herein comprises an extracellular binding domain. In some embodiments of any of the aspects, a CAR polypeptide as described herein comprises at least 1, at least 2, at least 3, at least 4, at least 5, at least 6, at least 7, at least 8, at least 9, or at least 10 extracellular binding domains. In some embodiments of any of the aspects, the CAR polypeptide or system comprises one extracellular binding domain. In some embodiments of any of the aspects, the CAR polypeptide or system comprises two extracellular binding domains. In embodiments comprising multiple extracellular binding domains, the multiple extracellular binding domains can be different individual extracellular binding domains or multiple copies of the same extracellular binding domains, or a combination of the foregoing. In some embodiments of any of the aspects, the extracellular binding domain is an antibody, an antigen-binding fragment thereof, a F(ab) fragment, a F(ab′) fragment, a single chain variable fragment (scFv), or a single-domain antibody (sdAb). In some embodiments of any of the aspects, the extracellular binding domain is monovalent, bivalent, or multivalent. In some embodiments of any of the aspects, the extracellular binding domain comprises a human, humanized, or chimeric antibody construct. Additionally, and as described herein, a recombinant humanized antibody can be further optimized to decrease potential immunogenicity, while maintaining functional activity, for therapy in humans. In this regard, functional activity means a polypeptide capable of displaying one or more known functional activities associated with a recombinant antibody or antibody reagent thereof as described herein. Such functional activities include, e.g. the ability to bind to a target.

[0427] Antibody reagents specific for the targets and/or markers described herein, e.g., tumor antigens are known in the art. For example, such reagents are readily commercially available. In some embodiments of any of the aspects, the extracellular binding domain can be an antibody reagent comprising one or more (e.g., one, two, three, four, five, or six) CDRs of any one of the antibodies described herein or known in the art. In some embodiments of any of the aspects, an antibody reagent specific for a target and/or maker described herein (e.g., that binds specifically to a tumor antigen as described herein) can be an antibody reagent comprising the six CDRs of any one of the antibodies described herein or known in the art. In some embodiments of any of the aspects, an antibody reagent specific for a target and/or maker described herein (e.g., that binds specifically to a tumor antigen as described herein) can be an antibody reagent comprising the three heavy chain CDRs of any one of the antibodies described herein or known in the art. In some embodiments of any of the aspects, an antibody reagent specific for a target and/or maker described herein (e.g., that binds specifically to a tumor antigen as described herein) can be an antibody reagent comprising the three light chain CDRs of any one of the antibodies described herein or known in the art. In some embodiments of any of the aspects, an antibody reagent specific for a target and/or maker described herein (e.g., that binds specifically to a tumor antigen as described herein) can be an antibody reagent comprising the VH and/or VL domains of any one of the antibodies described herein or known in the art. In some embodiments of any of the aspects, an antibody reagent specific for a target and/or maker described herein (e.g., that binds specifically to a tumor antigen as described herein) can be an antibody reagent comprising the VH and VL domains of any one of the antibodies described herein or known in the art. Such antibody reagents are specifically contemplated for use in the methods and/or compositions described herein.

[0428] As used herein, “antibody variable domain” refers to the portions of the light and heavy chains of antibody molecules that include amino acid sequences of Complementarity Determining Regions (CDRs; i.e., CDR1, CDR2, and CDR3), and Framework Regions (FRs). VH refers to the variable domain of the heavy chain. VL refers to the variable domain of the light chain. For the methods and compositions described herein, the amino acid positions assigned to CDRs and FRs may be defined according to Rabat (Sequences of Proteins of Immunological Interest (National Institutes of Health, Bethesda, Md., 1987 and 1991)). Amino acid numbering of antibodies or antigen binding fragments is also according to that of Rabat.

[0429] The terms “antigen-binding fragment” or “antigen-binding domain”, which are used interchangeably herein are used to refer to one or more fragments of a full length antibody that retain the ability to specifically bind to a target of interest. Examples of binding fragments encompassed within the term “antigen-binding fragment” of a full length antibody include (i) a Fab fragment, a monovalent fragment consisting of the VL, VH, CL and CH1 domains; (ii) a F(ab′)2 fragment, a bivalent fragment including two Fab fragments linked by a disulfide bridge at the hinge region; (iii) an Fd fragment consisting of the VH and CH1 domains; (iv) an Fv fragment consisting of the VL and VH domains of a single arm of an antibody, (v) a dAb fragment (Ward et al., (1989) Nature 341:544-546; which is incorporated by reference herein in its entirety), which consists of a VH or VL domain; and (vi) an isolated complementarity determining region (CDR) that retains specific antigen-binding functionality. The light chain and heavy chain-derived sequences can be provided in N to C terminal order respectively, or in the opposite order.

[0430] As used herein, the term “linker” refers to a chemical or peptide structure that covalently joins two polypeptide moieties. For example, a VH domain and a VL domain of an antibody can be joined by a peptide linker to form a VH/VL single chain antigen binding domain (e.g., as an scFv). Lengths of linkers can be varied to modify the ability of linked domains to form, e.g., intramolecular or intermolecular dimers. For example, a diabody includes a short linker peptide between VH and VL domains, usually 5 amino acids, that will not permit the VH and VL domains to pair to form an antigen-binding domain; expression of two different VH-VL constructs with this short linker arrangement in a cell permits the VH domain of a first VH-VL polypeptide chain to dimerize with the VL domain of the second VH-VL polypeptide chain, and the corresponding VL domain of the first VH-VL polypeptide chain to dimerize with the VH domain of the second VH-VL polypeptide chain, thereby generating a bispecific construct. In contrast, when the VH and VL domains are separated by a longer peptide linker, most often 15-20 amino acids, the VH domain and the VL domain on the same polypeptide chain can dimerize to form an scFv. Non-limiting examples of such linkers are described herein, including SEQ ID: 23 and 56.

[0431] In some embodiments of any of the aspects, the extracellular binding domain comprises a scFv. In some embodiments of any of the aspects, the extracellular binding domain comprises a scFv that specifically binds to a tumor antigen. In some embodiments of any of the aspects, the extracellular binding domain of a CAR polypeptide as described herein specifically binds to any tumor antigen, including those described herein. In some embodiments of any of the aspects, the extracellular binding domain comprises any known antibody, an antigen-binding fragment thereof, a F(ab) fragment, a F(ab′) fragment, a single chain variable fragment (scFv), or a single-domain antibody (sdAb) that binds to a tumor antigen or epitope as described herein.

[0432] Non-limiting examples of tumor antigens that can be targeted include EphA2, HER2, AXL, GD2, Glypican-3, 5T4, 8H9, αβ6 integrin, BCMA, B7-H3, B7-H6, CAIX, CA9, CD19, CD20, CD22, kappa light chain, CD30, CD33, CD38, CD44, CD44v6, CD44v7/8, CD70, CD123, CD138, CD171, CEA, CSPG4, EGFR, EGFRvIII, EGP2, EGP40, EPCAM, ERBB3, ERBB4, ErbB3/4, FAP, FAR, FBP, fetal AchR, Folate Receptor a, GD2, GD3, HLA-AI MAGE Al, HLA-A2, ILl 1Ra, IL13Ra2, KDR, Lambda, Lewis-Y, MCSP, Mesothelin, Mucl, Mucl6, NCAM, NKG2D ligands, NY-ESO-1, PRAME, PSCA, PSC1, PSMA, ROR1, SURVIVIN, TAG72, TEM1, TEM8, VEGRR2, carcinoembryonic antigen, HMW-MAA, and VEGF receptors. Other exemplary antigens that can be targeted are antigens that are present with in the extracellular matrix of tumors, such as oncofetal variants of fibronectin, tenascin, or necrotic regions of tumors.

[0433] Additional tumor-selective molecules that can be targeted include any membrane protein or biomarker that is expressed or overexpressed in tumor cells including, but not limited to, integrins (e.g., integrin αvβ3, α5β1), EGF Receptor Family (e.g., EGFR2, Erbb2/HER2/neu, Erbb3, Erbb4), proteoglycans (e.g., heparan sulfate proteoglycans), disialogangliosides (e.g., GD2, GD3), B7-H3 (aka CD276), cancer antigen 125 (CA-125), epithelial cell adhesion molecule (EpCAM), vascular endothelial growth factor receptors 1 and 2 (VEGFR-1, VEGFR-2), CD52, carcinoembryonic antigen (CEA), tumor associated glycoproteins (e.g., TAG-72), cluster of differentiation 19 (CD19), CD20, CD22, CD30, CD33, CD40, CD44, CD74, CD 152, mucin 1 (MUC1), tumor necrosis factor receptors (e.g., TRAIL-R2), insulin-like growth factor receptors, folate receptor a, transmembrane glycoprotein NMB (GPNMB), C-C chemokine receptors (e.g., CCR4), prostate specific membrane antigen (PSMA), recepteur d'origine nantais (RON) receptor, cytotoxic T-lymphocyte antigen 4 (CTLA4), and other tumor specific receptors or antigens.

[0434] Non-limiting examples of tumor antigens include the following: Differentiation antigens such as MART-1/MelanA (MART-I), gp100 (Pmel 17), tyrosinase, TRP-1, TRP-2 and tumor-specific multilineage antigens such as MAGE-1, MAGE-3, BAGE, GAGE-1, GAGE-2, p15; overexpressed embryonic antigens such as CEA; overexpressed oncogenes and mutated tumor-suppressor genes such as p53, Ras, HER-2/neu; unique tumor antigens resulting from chromosomal translocations; such as BCR-ABL, E2A-PRL, H4-RET, IGH-IGK, MYL-RAR; and viral antigens, such as the Epstein Barr virus antigens EBVA and the human papillomavirus (HPV) antigens E6 and E7. Other large, protein-based antigens include TSP-180, MAGE-4, MAGE-5, MAGE-6, RAGE, NY-ESO, p185erbB2, p180erbB-3, c-met, nm-23H1, PSA, TAG-72, CA 19-9, CA 72-4, CAM 17.1, NuMa, K-ras, beta-Catenin, CDK4, Mum-1, p 15, p 16, 43-9F, 5T4, 791Tgp72, alpha-fetoprotein, beta-HCG, BCA225, BTAA, CA 125, CA 15-3\CA 27.29\BCAA, CA 195, CA 242, CA-50, CAM43, CD68\P1, CO-029, FGF-5, G250, Ga733\EpCAM, HTgp-175, M344, MA-50, MG7-Ag, MOV18, NB/70K, NY-CO-1, RCAS1, SDCCAG16, TA-90\Mac-2 binding protein\cyclophilin C-associated protein, TAAL6, TAG72, TLP, and TPS.

[0435] In some embodiments of any of the aspects, the tumor antigen is a tumor antigen described in International Application PCT/US2015/020606 or US Patent Applications US20170209492 or US20170335281, the contents of each of which are herein incorporated by reference in their entireties. In some embodiments, the tumor antigen is chosen from one or more of: CD19; CD123; CD22; CD30; CD171; CS-1 (also referred to as CD2 subset 1, CRACC, SLAMF7, CD319, and 19A24); C-type lectin-like molecule-1 (CLL-1 or CLECL1); CD33; epidermal growth factor receptor variant III (EGFRvIII); ganglioside G2 (GD2); ganglioside GD3 (aNeu5Ac(2-8)aNeu5Ac(2-3)bDGalp(1-4)bDG1cp(1-1)Cer); TNF receptor family member B cell maturation (BCMA); Tn antigen ((Tn Ag) or (GalNAca-Ser/Thr)); prostate-specific membrane antigen (PSMA); Receptor tyrosine kinase-like orphan receptor 1 (ROR1); Fms-Like Tyrosine Kinase 3 (FLT3); Tumor-associated glycoprotein 72 (TAG72); CD38; CD44v6; Carcinoembryonic antigen (CEA); Epithelial cell adhesion molecule (EPCAM); B7H3 (CD276); KIT (CD 117); Interleukin-13 receptor subunit alpha-2 (IL-13Ra2 or CD213A2); Mesothelin; Interleukin 11 receptor alpha (IL-11Ra); prostate stem cell antigen (PSCA); Protease Serine 21 (Testisin or PRSS21); vascular endothelial growth factor receptor 2 (VEGFR2); Lewis(Y) antigen; CD24; Platelet-derived growth factor receptor beta (PDGFR-beta); Stage-specific embryonic antigen-4 (SSEA-4); CD20; Folate receptor alpha; Receptor tyrosine-protein kinase ERBB2 (Her2/neu); Mucin 1, cell surface associated (MUC1); epidermal growth factor receptor (EGFR); neural cell adhesion molecule (NCAM); Prostase; prostatic acid phosphatase (PAP); elongation factor 2 mutated (ELF2M); Ephrin B2; fibroblast activation protein alpha (FAP); insulin-like growth factor 1 receptor (IGF-I receptor), carbonic anhydrase IX (CAIX); Proteasome (Prosome, Macropain) Subunit, Beta Type, 9 (LMP2); glycoprotein 100 (gp 100); oncogene fusion protein consisting of breakpoint cluster region (BCR) and Abelson murine leukemia viral oncogene homolog 1 (Abl) (bcr-ab1); tyrosinase; ephrin type-A receptor 2 (EphA2); Fucosyl GM1; sialyl Lewis adhesion molecule (sLe); ganglioside GM3 (aNeu5Ac(2-3)bDGalp(1-4)bDG1cp(1-1)Cer); transglutaminase 5 (TGS5); high molecular weight-melanoma-associated antigen (HMWMAA); o-acetyl-GD2 ganglioside (OAcGD2); Folate receptor beta; tumor endothelial marker 1 (TEM1/CD248); tumor endothelial marker 7-related (TEM7R); claudin 6 (CLDN6); thyroid stimulating hormone receptor (TSHR); G protein-coupled receptor class C group 5, member D (GPRC5D); chromosome X open reading frame 61 (CXORF61); CD97; CD179a; anaplastic lymphoma kinase (ALK); Polysialic acid; placenta-specific 1 (PLAC 1); hexasaccharide portion of globoH glycoceramide (GloboH); mammary gland differentiation antigen (NY-BR-1); uroplakin 2 (UPK2); Hepatitis A virus cellular receptor 1 (HAVCR1); adrenoceptor beta 3 (ADRB3); pannexin 3 (PANX3); G protein-coupled receptor 20 (GPR20); lymphocyte antigen 6 complex, locus K 9 (LY6K); Olfactory receptor 51E2 (OR51E2); TCR Gamma Alternate Reading Frame Protein (TARP); Wilms tumor protein (WT1); Cancer/testis antigen 1 (NY-ESO-1); Cancer/testis antigen 2 (LAGE-1a); Melanoma-associated antigen 1 (MAGE-A1); ETS translocation-variant gene 6, located on chromosome 12p (ETV6-AML); sperm protein 17 (SPA17); X Antigen Family, Member 1A (XAGE1); angiopoietin-binding cell surface receptor 2 (Tie 2); melanoma cancer testis antigen-1 (MAD-CT-1); melanoma cancer testis antigen-2 (MAD-CT-2); Fos-related antigen 1; tumor protein p53 (p53); p53 mutant; prostein; surviving; telomerase; prostate carcinoma tumor antigen-1 (PCTA-1 or Galectin 8), melanoma antigen recognized by T cells 1 (MelanA or MARTI); Rat sarcoma (Ras) mutant; human Telomerase reverse transcriptase (hTERT); sarcoma translocation breakpoints; melanoma inhibitor of apoptosis (ML-IAP); ERG (transmembrane protease, serine 2 (TMPRSS2) ETS fusion gene); N-Acetyl glucosaminyl-transferase V (NA17); paired box protein Pax-3 (PAX3); Androgen receptor; Cyclin B 1; v-myc avian myelocytomatosis viral oncogene neuroblastoma derived homolog (MYCN); Ras Homolog Family Member C (RhoC); Tyrosinase-related protein 2 (TRP-2); Cytochrome P450 1B1 (CYP1B1); CCCTC-Binding Factor (Zinc Finger Protein)-Like (BORIS or Brother of the Regulator of Imprinted Sites), Squamous Cell Carcinoma Antigen Recognized By T Cells 3 (SART3); Paired box protein Pax-5 (PAXS); proacrosin binding protein sp32 (OY-TES1); lymphocyte-specific protein tyrosine kinase (LCK); A kinase anchor protein 4 (AKAP-4); synovial sarcoma, X breakpoint 2 (SSX2); Receptor for Advanced Glycation Endproducts (RAGE-1); renal ubiquitous 1 (RU 1); renal ubiquitous 2 (RU2); legumain; human papilloma virus E6 (HPV E6); human papilloma virus E7 (HPV E7); intestinal carboxyl esterase; heat shock protein 70-2 mutated (mut hsp70-2); CD79a; CD79b; CD72; Leukocyte-associated immunoglobulin-like receptor 1 (LAIR1); Fc fragment of IgA receptor (FCAR or CD89); Leukocyte immunoglobulin-like receptor subfamily A member 2 (LILRA2); CD300 molecule-like family member f (CD300LF); C-type lectin domain family 12 member A (CLEC12A); bone marrow stromal cell antigen 2 (BST2); EGF-like module-containing mucin-like hormone receptor-like 2 (EMR2); lymphocyte antigen 75 (LY75); Glypican-3 (GPC3); Fc receptor-like 5 (FCRL5); and immunoglobulin lambda-like polypeptide 1 (IGLL1). In some embodiments, the tumor antigen is GFRa4 (see e.g., Spinasanta, “The Endocrine Society's 97th Annual Meeting & Expo: Targeted Therapies in Medullary Thyroid Cancer” Mar. 13, 2015).

[0436] In some embodiments of any of the aspects, the extracellular binding domain comprises an anti-Her2 antibody. HER2 (human epidermal growth factor receptor 2) is a gene that plays a role in the development of breast cancer. Cancers that can be HER2 positive include breast, bladder, pancreatic, ovarian, and stomach cancers. Non-limiting examples of anti-Her2 antibodies include G98A, C6.5, ML39, H3B1 (e.g., SEQ ID NOs: 8, 41), scFv800E6, and trastuzumab. See e.g., Rudnick et al., Cancer Res. 2011 Mar. 15, 71(6): 2250-2259; Sommaruga et al. Appl Microbiol Biotechnol. 2011 August, 91(3):613-21; US Patents U.S. Pat. Nos. 5,977,322, 8,580,263, 8,703,427, 8,927,694, U.S. Ser. No. 10/188,742, U.S. Ser. No. 10/239,951, the contents of each of which are incorporated herein by reference in their entireties.

[0437] In some embodiments of any of the aspects, the extracellular binding domain comprises an anti-Axl antibody. AXL overexpression has been demonstrated in various cancer types, e.g. breast (Meric et al., Clin. Cancer Res. 8: 361-367, 2002; Berclaz et al., Ann. Oncol. 12: 819-824, 2001), colon (Chen et al., Int. J. Cancer 83: 579-584, 1999; Craven et al., Int. J. Cancer 60: 791-797, 1995), prostate (Jacob et al., Cancer Detect. Prey. 23: 325-332, 1999), lung (Wimmel et al., Eur J Cancer 37: 2264-2274, 2001), gastric (Wu et al., Anticancer Res 22: 1071-1078, 2002), ovarian (Sun et al., Oncology 66: 450-457, 2004), endometrial (Sun et al., Ann. Oncol. 14: 898-906, 2003), renal (Chung et al., DNA Cell Biol. 22: 533-540, 2003), hepatocellular (Tsou et al., Genomics 50:331-340, 1998), thyroid (Ito et al., Thyroid 12:971-975, 2002; Ito et al., Thyroid 9: 563-567, 1999), and esophageal carcinoma (Nemoto et al., 1997), furthermore in CML (Janssen et al., A novel putative tyrosine kinase receptor with oncogenic potential. Oncogene, 6: 2113-2120, 1991; Braunger et al., Oncogene 14:2619-2631 1997; O'Bryan et al., Mol Cell Biol 11:5016-5031, 1991), AML (Rochlitz et al., Leukemia 13: 1352-1358, 1999), osteosarcoma (Nakano et al., J. Biol. Chem. 270:5702-5705, 2003) melanoma (van Ginkel et al., Cancer Res 64:128-134, 2004) and in head and neck squamous cell carcinoma (Green et al., Br J. Cancer. 2006 94:1446-5, 2006). Moreover, AXL has been identified as a metastasis-associated gene that is upregulated in aggressive breast cancer cell lines compared to non-invasive cells. Non-limiting examples of anti-Axl antibodies include 11B7, 11D5, 10D12, and h#11B7-T18 (e.g., SEQ ID NOs: 22-24, 55-57). See e.g., International Patent Application WO2010130751 or US Patent U.S. Pat. No. 8,841,424, the contents of each of which are incorporated herein by reference in their entireties.

[0438] In some embodiments of any of the aspects, the extracellular binding domain comprises an anti-CD 19 antibody. Since CD19 is a marker of B cells, the protein has been used to diagnose cancers that arise from this type of cell—notably B cell lymphomas, acute lymphoblastic leukemia (ALL), and chronic lymphocytic leukemia (CLL). The majority of B cell malignancies express normal to high levels of CD 19. Non-limiting examples of anti-CD19 antibodies include A3B1, FMC63, FMC63-28Z, SEQ ID NO: 94; see e.g., U.S. patent Ser. No. 10/221,245, U.S. Pat. No. 8,906,682, Ser. No. 10/421,810, the contents of each of which are incorporated herein by reference in their entireties.

[0439] Depending on the desired antigen to be targeted, the CAR polypeptide described herein can be engineered to include the appropriate antigen bind moiety that is specific to the desired antigen target. For example, if CD 19 is the desired antigen that is to be targeted, an antibody for CD 19 can be used as the antigen bind moiety for incorporation into a CAR polypeptide as described herein.

[0440] In some embodiments of any of the aspects, the extracellular binding domain of a CAR polypeptide as described herein comprises SEQ ID NOs: 41, 55-57, 94, or an amino acid sequence that is at least 70%, at least 75%, at least 80%, at least 85%, at least 90%, at least 90%, at least 91%, at least 92%, at least 93%, at least 94%, at least 95%, at least 96%, at least 97%, at least 98%, or at least 99% identical to the sequence of one of SEQ ID NOs: 41, 55-57, or 94, that maintains the same functions as one of SEQ ID NOs: 41, 55-57, 94 (e.g., tumor antigen binding). In some embodiments of any of the aspects, the extracellular binding domain of a CAR polypeptide as described herein comprises SEQ ID NOs: 41, 55-57, 94, or an amino acid sequence that is at least 95% identical to the sequence of one of SEQ ID NOs: 41, 55-57, or 94, that maintains the same function.

[0441] In some embodiments of any of the aspects, the extracellular binding domain of a CAR polypeptide as described herein is encoded by a nucleic acid sequence comprising SEQ ID NOs: 8, 22-24, 70 or a sequence that is at least 70%, at least 75%, at least 80%, at least 85%, at least 90%, at least 90%, at least 91%, at least 92%, at least 93%, at least 94%, at least 95%, at least 96%, at least 97%, at least 98%, or at least 99% identical to one of SEQ ID NOs: 8, 22-24, or 70 that maintains the same function or a codon-optimized version of one of SEQ ID NOs: 8, 22-24, or 70. In some embodiments of any of the aspects, the extracellular binding domain of a CAR polypeptide as described herein is encoded by a nucleic acid sequence comprising SEQ ID NOs: 8, 22-24, 70 or a sequence that is at least 95% identical to one of SEQ ID NOs: 8, 22-24, or 70 that maintains the same function.

[0442] In some embodiments of any of the aspects, the extracellular binding domain can target antigens involved in diseases other than cancer (e.g., alloimmunity, autoimmunity, infectious disease, etc.). In some embodiments of any of the aspects, the extracellular binding domain can target its antigen using a biotinylated antigen-specific molecules, e.g., instead of a scFv.

[0443] In some embodiments of any of the aspects, a CAR polypeptide as described herein comprises a spacer domain. In some embodiments of any of the aspects, the spacer domain is located between the extracellular binding domain and the transmembrane domain. In some embodiments of any of the aspects, the spacer domain is C terminal of the extracellular binding domain and N terminal of the transmembrane domain. In some embodiments of any of the aspects, the spacer domain comprises a hinge domain. In some embodiments of any of the aspects, a CAR polypeptide as described herein (or a CAR polypeptide system collectively) comprises 1, 2, 3, 4, 5, or more hinge domains, e.g., C terminal of each extracellular binding domain. In some embodiments of any of the aspects, the CAR polypeptide or system comprises one hinge domain. In embodiments comprising multiple hinge domains, the multiple hinge domains can be different individual hinge domains or multiple copies of the same hinge domain, or a combination of the foregoing.

[0444] In some embodiments of any of the aspects, the hinge domain comprises an immunoglobulin G (IgG)-based hinge or a derivative of CD8a or CD28 extracellular domains. Incorporation of a hinge domain has been shown to improve the expansion of chimeric antigen receptor T cells and to increase the antitumor efficacy of CAR T cells (see e.g., Qin et al., Journal of Hematology & Oncology volume 10, Article number: 68 (2017); Stoiber et al., Cells. 2019 May; 8(5): 472). Hinge domains can be derived from IgG subclasses (such as IgG1 and IgG4), IgD and CD8 domains, of which IgG1 has been most extensively used. A hinge domain preferably provides the following four aspects: (1) reduced binding affinity to the Fcγ receptor, thereby eliminating off-target activation; (2) enhanced flexibility for the extracellular binding domain (e.g., scFv), thereby relieving the spatial constraints between tumor antigens and CARs, in turn promoting synapse formation between the CAR T cells and target cells; for example, to overcome steric hindrance in MUC1-specific CAR, a flexible and elongated hinge of the IgD isotype can be inserted; (3) reduced distance between an extracellular binding domain (e.g., scFv) and the target antigen or epitope, for example, anti-CD22 CAR needs a hinge domain to exert optimal cytotoxicity; and (4) facilitated detection of CAR expression using anti-Fc reagents. In some embodiments of any of the aspects, the hinge domain promotes CAR dimerization.

[0445] In some embodiments of any of the aspects, the hinge domain comprises a CD8a hinge domain. In some embodiments of any of the aspects, the hinge domain of a CAR polypeptide as described herein comprises SEQ ID NO: 43, or an amino acid sequence that is at least 70%, at least 75%, at least 80%, at least 85%, at least 90%, at least 90%, at least 91%, at least 92%, at least 93%, at least 94%, at least 95%, at least 96%, at least 97%, at least 98%, or at least 99% identical to the sequence of SEQ ID NO: 43, that maintains the same functions as SEQ ID NO: 43 (e.g., displaying the extracellular binding region). In some embodiments of any of the aspects, the hinge domain of a CAR polypeptide as described herein comprises SEQ ID NO: 43, or an amino acid sequence that is at least 95% identical to the sequence of SEQ ID NO: 43, that maintains the same function.

[0446] In some embodiments of any of the aspects, the hinge domain of a CAR polypeptide as described herein is encoded by a nucleic acid sequence comprising SEQ ID NO: 10 or a sequence that is at least 70%, at least 75%, at least 80%, at least 85%, at least 90%, at least 90%, at least 91%, at least 92%, at least 93%, at least 94%, at least 95%, at least 96%, at least 97%, at least 98%, or at least 99% identical to SEQ ID NO: 10 that maintains the same function or a codon-optimized version of SEQ ID NO: 10. In some embodiments of any of the aspects, the hinge domain of a CAR polypeptide as described herein is encoded by a nucleic acid sequence comprising SEQ ID NO: 10 or a sequence that is at least 95% identical to SEQ ID NO: 10 that maintains the same function.

[0447] In several aspects, described herein are CAR polypeptides comprising an extracellular domain (e.g., OFF-switch CAR polypeptides, and reader CAR polypeptides). As used herein, the term “extracellular domain” refers to a portion of a polypeptide that is external to the cell membrane. The term “ectodomain” can be used interchangeably with “extracellular domain.” In one embodiment, a polypeptide comprising an extracellular domain also comprises a transmembrane domain as described herein. In some embodiments of any of the aspects, a polypeptide comprises an extracellular domain that is not an extracellular binding domain. In some embodiments of any of the aspects, a CAR polypeptide as described herein (or a CAR polypeptide system collectively) comprises 1, 2, 3, 4, 5, or more extracellular domains. In some embodiments of any of the aspects, the CAR polypeptide or system comprises one extracellular domain. In embodiments comprising multiple extracellular domains, the multiple extracellular domains can be different individual extracellular domains or multiple copies of the same extracellular domain, or a combination of the foregoing.

[0448] In some embodiments of any of the aspects, the CAR polypeptide can comprise an extracellular domain selected from the extracellular domains of: TCRC; FcRy; FcRp; CD3zeta; CD3y; CD35; CD3s; CD3C; CD22; CD79a; CD79b; CD66d; CARD11; CD2; CD7; CD27; CD28; CD30; CD40; CD54 (ICAM); CD83; CD134 (OX40); CD137 (4-1BB); CD150 (SLAMF1); CD152 (CTLA4); CD223 (LAG3); CD270 (HVEM); CD273 (PD-L2); CD274 (PD-Ll); CD278 (ICOS); DAP10; LAT; KD2C SLP76; TRIM; ZAP70; and 41BB.

[0449] In some embodiments of any of the aspects, the extracellular domain can comprise the DNAX-activating protein 10 (DAP10) ectodomain. The DAP10 ectodomain mediates homo-dimerization; see e.g., Wu J, Song Y, Bakker A B, Bauer S, Spies T, Lanier L L, Phillips J H Science. 1999 Jul. 30; 285(5428):730-2. Therefore, a polypeptide comprising a DAP10 ectodomain can recruit a second polypeptide comprising a DAP10 ectodomain, leading to increased numbers and activities of these polypeptides. In some embodiments of any of the aspects, the extracellular domain comprises a homodimerization domain.

[0450] In some embodiments of any of the aspects, the extracellular domain of a CAR polypeptide as described herein comprises SEQ ID NO: 47, or an amino acid sequence that is at least 70%, at least 75%, at least 80%, at least 85%, at least 90%, at least 90%, at least 91%, at least 92%, at least 93%, at least 94%, at least 95%, at least 96%, at least 97%, at least 98%, or at least 99% identical to the sequence of SEQ ID NO: 47, that maintains the same functions as SEQ ID NO: 47 (e.g., homo-dimerization). In some embodiments of any of the aspects, the extracellular domain of a CAR polypeptide as described herein comprises SEQ ID NO: 47, or an amino acid sequence that is at least 95% identical to the sequence of SEQ ID NO: 47, that maintains the same function.

[0451] In some embodiments, the extracellular domain of a CAR polypeptide as described herein is encoded by a nucleic acid sequence comprising SEQ ID NO: 72 or a sequence that is at least 70%, at least 75%, at least 80%, at least 85%, at least 90%, at least 90%, at least 91%, at least 92%, at least 93%, at least 94%, at least 95%, at least 96%, at least 97%, at least 98%, or at least 99% identical to SEQ ID NO: 72 that maintains the same function or a codon-optimized version of SEQ ID NO: 72. In some embodiments, the extracellular domain of a CAR polypeptide as described herein is encoded by a nucleic acid sequence comprising SEQ ID NO: 72 or a sequence that is at least 95% identical to SEQ ID NO: 72 that maintains the same function.

[0452] In several aspects, described herein are CAR polypeptides comprising a transmembrane domain. With respect to the transmembrane domain, the CAR can be designed to comprise a transmembrane domain that is fused to the extracellular domain or extracellular binding domain of the CAR. In some embodiments of any of the aspects, the CAR polypeptide (or the CAR polypeptide system collectively) comprises 1, 2, 3, 4, 5, or more transmembrane domains. In some embodiments of any of the aspects, each CAR polypeptide comprises one transmembrane domain. In embodiments comprising multiple transmembrane domains, the multiple transmembrane domains can be different individual transmembrane domains or multiple copies of the same transmembrane domain, or a combination of the foregoing.

[0453] In one embodiment, the transmembrane domain that naturally is associated with one of the domains in the CAR is used. In some instances, the transmembrane domain can be selected or modified by amino acid substitution to avoid binding of such domains to the transmembrane domains of the same or different surface membrane proteins to minimize interactions with other members of the receptor complex.

[0454] In some embodiments of any of the aspects, the transmembrane domain can be derived either from a natural or from a synthetic source. Where the source is natural, the domain can be derived from any membrane-bound or transmembrane protein. Transmembrane regions of particular use for the CAR polypeptide described herein (i.e. comprise at least the transmembrane region(s) of) the alpha, beta or zeta chain of the T-cell receptor, CD28, CD23zeta, CD28, 4-1BB, CD3 epsilon, CD45, CD4, CD5, CD8, CD9, CD16, CD22, CD33, CD37, CD64, CD80, CD86, CD134, CD137, CD154. Alternatively, the transmembrane domain can be synthetic, in which case it will comprise predominantly hydrophobic residues such as leucine and valine. Preferably a triplet of phenylalanine, tryptophan and valine will be found at each end of a synthetic transmembrane domain. Optionally, a short oligo- or polypeptide linker, preferably between 2 and 10 amino acids in length may form the linkage between the transmembrane domain and the cytoplasmic signaling domain of the CAR. A glycine-serine doublet provides a particularly suitable linker. In some embodiments of any of the aspects, the transmembrane domain comprises the transmembrane domain of CD28. In some embodiments of any of the aspects, the transmembrane domain comprises the transmembrane domain of CD8.

[0455] In some embodiments of any of the aspects, the transmembrane domain of a CAR polypeptide as described herein comprises SEQ ID NOs: 44, 97, or an amino acid sequence that is at least 70%, at least 75%, at least 80%, at least 85%, at least 90%, at least 90%, at least 91%, at least 92%, at least 93%, at least 94%, at least 95%, at least 96%, at least 97%, at least 98%, or at least 99% identical to the sequence of SEQ ID NO: 44 or 97, that maintains the same functions as SEQ ID NOs: 44 or 97 (e.g., localizes to the cell membrane). In some embodiments of any of the aspects, the transmembrane domain of a CAR polypeptide as described herein comprises SEQ ID NOs: 44, 97, or an amino acid sequence that is at least 95% identical to the sequence of SEQ ID NO: 44 or 97 that maintains the same function.

[0456] In some embodiments of any of the aspects, the transmembrane domain of a CAR polypeptide as described herein is encoded by a nucleic acid sequence comprising SEQ ID NOs: 11, 73, 124 or a sequence that is at least 70%, at least 75%, at least 80%, at least 85%, at least 90%, at least 90%, at least 91%, at least 92%, at least 93%, at least 94%, at least 95%, at least 96%, at least 97%, at least 98%, or at least 99% identical to one of SEQ ID NOs: 11, 73, or 124 that maintains the same function or a codon-optimized version of one of SEQ ID NOs: 11, 73, or 124. In some embodiments of any of the aspects, the transmembrane domain of a CAR polypeptide as described herein is encoded by a nucleic acid sequence comprising SEQ ID NOs: 11, 73, 124 or a sequence that is at least 95% identical to one of SEQ ID NOs: 11, 73, or 124 that maintains the same function.

SEQ ID NO: 124, CD8 transmembrane domain, 63 nt
( [symbol] shows T42C silent
mutation from SEQ ID NO: 73; the mutation has no
effect on the amino acid sequence, thus SEQ ID
NOs: 73 and 124 can be used interchangeably).
ATATACATCTGGGCTCCTCTGGCTGGCACTTGCGGAGTGCT [symbol] CTGCTG
AGTCTGGTTATTACC

[0457] In some embodiments of any of the aspects, a CAR polypeptide as described herein does not comprise an extracellular domain, an extracellular binding domain, and/or a transmembrane domain. Accordingly, CAR polypeptides as described herein can be cytosolic proteins, as opposed to transmembrane proteins, especially when the CAR polypeptide does not comprise an extracellular binding domain.

[0458] In several aspects, described herein are CAR polypeptides comprising at least one intracellular signaling domain. The cytoplasmic domain or otherwise the intracellular signaling domain of the CAR polypeptides described herein is responsible for activation of at least one of the normal effector functions of the immune cell in which the CAR has been placed in. The term “effector function” refers to a specialized function of a cell. Effector function of a T cell, for example, may be cytolytic activity or helper activity including the secretion of cytokines. Thus the term “intracellular signaling domain” refers to the portion of a protein which transduces the effector function signal (e.g., from the extracellular biding domain specifically binding its cognate antigen) and directs the cell to perform a specialized function. While usually the entire intracellular signaling domain can be employed, in many cases it is not necessary to use the entire chain. To the extent that a truncated portion of the intracellular signaling domain is used, such truncated portion may be used in place of the intact chain as long as it transduces the effector function signal. The term intracellular signaling domain is thus meant to include any truncated portion of the intracellular signaling domain sufficient to transduce the effector function signal.

[0459] In some embodiments of any of the aspects, the CAR polypeptide (or the CAR polypeptide system collectively) comprises 1, 2, 3, 4, 5, or more intracellular signaling domains. In some embodiments of any of the aspects, the CAR polypeptide or system comprises three intracellular signaling domains. In embodiments comprising multiple intracellular signaling domains, the multiple intracellular signaling domains can be different individual intracellular signaling domains or multiple copies of the same intracellular signaling domain, or a combination of the foregoing.

[0460] Non-limiting examples of intracellular signaling domains for use in the CAR polypeptides described herein include the cytoplasmic sequences of the T cell receptor (TCR) and co-receptors that act in concert to initiate signal transduction following antigen receptor engagement, as well as any derivative or variant of these sequences and any synthetic sequence that has the same functional capability.

[0461] Signals generated through the TCR alone are insufficient for full activation of the T cell and that a secondary or co-stimulatory signal is also required. Thus, T cell activation can be said to be mediated by two distinct classes of cytoplasmic signaling sequence: those that initiate antigen-dependent primary activation through the TCR (primary cytoplasmic signaling sequences) and those that act in an antigen-independent manner to provide a secondary or co-stimulatory signal (secondary cytoplasmic signaling sequences).

[0462] Primary cytoplasmic signaling sequences regulate primary activation of the TCR complex either in a stimulatory way, or in an inhibitory way. Primary cytoplasmic signaling sequences that act in a stimulatory manner may contain signaling motifs which are known as immunoreceptor tyrosine-based activation motifs or ITAMs.

[0463] Examples of ITAM containing primary cytoplasmic signaling sequences that are of particular use in the CAR polypeptides described herein include those derived from TCR zeta (also referred to as the zeta-chain, CD3zeta, or CD247), FcR gamma, FcR beta, CD3 gamma, CD3 delta, CD3 epsilon, CD5, CD22, CD79a, CD79b, and CD66d. A cytoplasmic signaling molecule in the CAR polypeptide can comprise a cytoplasmic signaling sequence derived from CD3 zeta.

[0464] In one embodiment, the cytoplasmic domain of the CAR can be designed to comprise the CD3-zeta signaling domain by itself or combined with any other desired cytoplasmic domain(s) useful in the context of the CAR polypeptides described herein. For example, the cytoplasmic domain of the CAR can comprise a CD3 zeta chain portion and a costimulatory signaling region. The costimulatory signaling region refers to a portion of the CAR comprising the intracellular domain of a costimulatory molecule. A costimulatory molecule is a cell surface molecule other than an antigen receptor or their ligands that is required for an efficient response of lymphocytes to an antigen. Examples of such molecules include CD27, CD28, 4-1BB (CD137), OX40, CD30, CD40, PD-1, ICOS, lymphocyte function-associated antigen-1 (LFA-1), CD2, CD7, LIGHT, NKG2C, B7-H3, and a ligand that specifically binds with CD83, and the like. Thus, while the CAR polypeptides described herein are exemplified primarily with 4-1BB and CD28 as the co-stimulatory signaling elements, other costimulatory elements are within the scope of the invention.

[0465] The cytoplasmic signaling sequences within the cytoplasmic signaling portion of the CAR polypeptides described herein may be linked to each other in a random or specified order. Optionally, a short oligo- or polypeptide linker, preferably between 2 and 10 amino acids in length may form the linkage. A glycine-serine doublet provides a particularly suitable linker.

[0466] In one embodiment, the cytoplasmic domain is designed to comprise the signaling domain of CD3-zeta and the signaling domain of CD28. In another embodiment, the cytoplasmic domain is designed to comprise the signaling domain of CD3-zeta and the signaling domain of 4-1BB. In yet another embodiment, the cytoplasmic domain is designed to comprise the signaling domain of CD3-zeta and the signaling domain of CD28 and 4-1BB.

[0467] In one embodiment of any aspect, the intracellular signaling domain is a signaling domain from a protein selected from the group consisting of: TCRC; FcRy; FcRp; CD3zeta; CD3y; CD35; CD3s; CD3C; CD22; CD79a; CD79b; CD66d; CARD11; CD2; CD7; CD27; CD28; CD30; CD40; CD54 (ICAM); CD83; CD134 (OX40); CD137 (4-1BB); CD150 (SLAMF1); CD152 (CTLA4); CD223 (LAG3); CD270 (HVEM); CD273 (PD-L2); CD274 (PD-Ll); CD278 (ICOS); DAP10; LAT; KD2C SLP76; TRIM; ZAP70; and 41BB.

[0468] In some embodiments of any of the aspects, the intracellular signaling domain of a CAR polypeptide as described herein comprises SEQ ID NOs: 52, 53, 54, or an amino acid sequence that is at least 70%, at least 75%, at least 80%, at least 85%, at least 90%, at least 90%, at least 91%, at least 92%, at least 93%, at least 94%, at least 95%, at least 96%, at least 97%, at least 98%, or at least 99% identical to the sequence of one of SEQ ID NOs: 52-54, that maintains the same functions as one of SEQ ID NOs: 52-54 (e.g., intracellular signaling upon activation of the CAR polypeptide by binding its cognate antigen). In some embodiments of any of the aspects, the intracellular signaling domain of a CAR polypeptide as described herein comprises SEQ ID NOs: 52, 53, 54, or an amino acid sequence that is at least 95% identical to the sequence of one of SEQ ID NOs: 52-54 that maintains the same function.

[0469] In some embodiments of any of the aspects, the intracellular signaling domain of a CAR polypeptide as described herein is encoded by a nucleic acid sequence comprising SEQ ID NOs: 19, 20, 21 or a sequence that is at least 70%, at least 75%, at least 80%, at least 85%, at least 90%, at least 90%, at least 91%, at least 92%, at least 93%, at least 94%, at least 95%, at least 96%, at least 97%, at least 98%, or at least 99% identical to one of SEQ ID NOs: 19-21 that maintains the same function or a codon-optimized version of one of SEQ ID NOs: 19-21. In some embodiments of any of the aspects, the intracellular signaling domain of a CAR polypeptide as described herein is encoded by a nucleic acid sequence comprising SEQ ID NOs: 19, 20, 21 or a sequence that is at least 95% identical to one of SEQ ID NOs: 19-21 that maintains the same function.

[0470] In some embodiments of any of the aspects, a CAR polypeptide as described herein comprises the intracellular signaling domain of CD28, which comprises SEQ ID NO: 52 or an amino acid sequence that is at least 70%, at least 75%, at least 80%, at least 85%, at least 90%, at least 90%, at least 91%, at least 92%, at least 93%, at least 94%, at least 95%, at least 96%, at least 97%, at least 98%, or at least 99% identical to the sequence of SEQ ID NO: 52, that maintains the same function. In some embodiments of any of the aspects, a CAR polypeptide as described herein comprises the intracellular signaling domain of CD28, which comprises SEQ ID NO: 52 or an amino acid sequence that is at least 95% identical to the sequence of SEQ ID NO: 52, that maintains the same function.

[0471] In some embodiments of any of the aspects, a CAR polypeptide as described herein comprises the intracellular signaling domain of CD28, which is encoded by a nucleic acid sequence comprising SEQ ID NO: 19 or a sequence that is at least 70%, at least 75%, at least 80%, at least 85%, at least 90%, at least 90%, at least 91%, at least 92%, at least 93%, at least 94%, at least 95%, at least 96%, at least 97%, at least 98%, or at least 99% identical to SEQ ID NO: 19 that maintains the same function or a codon-optimized version of SEQ ID NO: 19. In some embodiments of any of the aspects, a CAR polypeptide as described herein comprises the intracellular signaling domain of CD28, which is encoded by a nucleic acid sequence comprising SEQ ID NO: 19 or a sequence that is at least 95% identical to SEQ ID NO: 19 that maintains the same function.

[0472] In some embodiments of any of the aspects, a CAR polypeptide as described herein comprises the intracellular signaling domain of 4-1BB, which comprises SEQ ID NO: 53 or an amino acid sequence that is at least 70%, at least 75%, at least 80%, at least 85%, at least 90%, at least 90%, at least 91%, at least 92%, at least 93%, at least 94%, at least 95%, at least 96%, at least 97%, at least 98%, or at least 99% identical to the sequence of SEQ ID NO: 53, that maintains the same function. In some embodiments of any of the aspects, a CAR polypeptide as described herein comprises the intracellular signaling domain of 4-1BB, which comprises SEQ ID NO: 53 or an amino acid sequence that is at least 95% identical to the sequence of SEQ ID NO: 53, that maintains the same function.

[0473] In some embodiments of any of the aspects, a CAR polypeptide as described herein comprises the intracellular signaling domain of 4-1BB, which is encoded by a nucleic acid sequence comprising SEQ ID NO: 20 or a sequence that is at least 70%, at least 75%, at least 80%, at least 85%, at least 90%, at least 90%, at least 91%, at least 92%, at least 93%, at least 94%, at least 95%, at least 96%, at least 97%, at least 98%, or at least 99% identical to SEQ ID NO: 20 that maintains the same function or a codon-optimized version of SEQ ID NO: 20. In some embodiments of any of the aspects, a CAR polypeptide as described herein comprises the intracellular signaling domain of 4-1BB, which is encoded by a nucleic acid sequence comprising SEQ ID NO: 20 or a sequence that is at least 95% identical to SEQ ID NO: 20 that maintains the same function.

[0474] In some embodiments of any of the aspects, a CAR polypeptide as described herein comprises the intracellular signaling domain of CD3zeta, which comprises SEQ ID NO: 54 or an amino acid sequence that is at least 70%, at least 75%, at least 80%, at least 85%, at least 90%, at least 90%, at least 91%, at least 92%, at least 93%, at least 94%, at least 95%, at least 96%, at least 97%, at least 98%, or at least 99% identical to the sequence of SEQ ID NO: 54, that maintains the same function. In some embodiments of any of the aspects, a CAR polypeptide as described herein comprises the intracellular signaling domain of CD3zeta, which comprises SEQ ID NO: 54 or an amino acid sequence that is at least 95% identical to the sequence of SEQ ID NO: 54, that maintains the same function.

[0475] In some embodiments of any of the aspects, a CAR polypeptide as described herein comprises the intracellular signaling domain of CD3zeta, which is encoded by a nucleic acid sequence comprising SEQ ID NO: 21 or a sequence that is at least 70%, at least 75%, at least 80%, at least 85%, at least 90%, at least 90%, at least 91%, at least 92%, at least 93%, at least 94%, at least 95%, at least 96%, at least 97%, at least 98%, or at least 99% identical to SEQ ID NO: 21 that maintains the same function or a codon-optimized version of SEQ ID NO: 21. In some embodiments of any of the aspects, a CAR polypeptide as described herein comprises the intracellular signaling domain of CD3zeta, which is encoded by a nucleic acid sequence comprising SEQ ID NO: 21 or a sequence that is at least 95% identical to SEQ ID NO: 21 that maintains the same function.

[0476] In several aspects, described herein are CAR polypeptides comprising at least one detectable marker. As used herein, the term “detectable marker” refers to a moiety that, when attached to the CAR polypeptide, confers detectability upon that polypeptide or another molecule to which the polypeptide binds. In some embodiments of any of the aspects, the CAR polypeptide (or the CAR polypeptide system collectively) comprises 1, 2, 3, 4, 5, or more detectable markers. In some embodiments of any of the aspects, the CAR polypeptide or system comprises one detectable marker. In embodiments comprising multiple detectable markers, the multiple detectable markers can be different individual detectable markers or multiple copies of the same detectable markers, or a combination of the foregoing.

[0477] In some embodiments of any of the aspects, fluorescent moieties can be used as detectable markers, but detectable markers also include, for example, isotopes, fluorescent proteins and peptides, enzymes, components of a specific binding pair, chromophores, affinity tags as defined herein, antibodies, colloidal metals (i.e. gold) and quantum dots. Detectable markers can be either directly or indirectly detectable. Directly detectable markers do not require additional reagents or substrates in order to generate detectable signal. Examples include isotopes and fluorophores. Indirectly detectable markers require the presence or action of one or more co-factors or substrates. Examples include enzymes such as β-galactosidase which is detectable by generation of colored reaction products upon cleavage of substrates such as the chromogen X-gal (5-bromo-4-chloro-3-indoyl-β-D-galactopyranoside), horseradish peroxidase which is detectable by generation of a colored reaction product in the presence of the substrate diaminobenzidine and alkaline phosphatase which is detectable by generation of colored reaction product in the presence of nitroblue tetrazolium and 5-bromo-4-chloro-3-indolyl phosphate, and affinity tags. Non-limiting examples of affinity tags include Strep-tags, chitin binding proteins (CBP), maltose binding proteins (MBP), glutathione-S-transferase (GST), FLAG-tags, HA-tags, Myc-tags, poly(His)-tags as well as derivatives thereof. In some embodiments of any of the aspects, the detectable marker is selected from GFP, V5, HA1, Myc, VSV-G, HSV, FLAG, HIS, mCherry, AU1, and biotin.

[0478] In some embodiments of any of the aspects, the detectable marker of a CAR polypeptide as described herein comprises SEQ ID NOs: 42, 47, 51, 58, or 100, or an amino acid sequence that is at least 70%, at least 75%, at least 80%, at least 85%, at least 90%, at least 90%, at least 91%, at least 92%, at least 93%, at least 94%, at least 95%, at least 96%, at least 97%, at least 98%, or at least 99% identical to the sequence of one of SEQ ID NOs: 42, 47, 51, 58, or 100, that maintains the same functions as one of SEQ ID NOs: 42, 47, 51, 58, or 100 (e.g., detection of the CAR polypeptide or cleaved fragments of the CAR polypeptide). In some embodiments of any of the aspects, the detectable marker of a CAR polypeptide as described herein comprises SEQ ID NOs: 42, 47, 51, 58, or 100, or an amino acid sequence that is at least 95% identical to the sequence of one of SEQ ID NOs: 42, 47, 51, 58, or 100, that maintains the same function.

[0479] In some embodiments of any of the aspects, the detectable marker of a CAR polypeptide as described herein is encoded by a nucleic acid sequence comprising SEQ ID NOs: 9, 14, 18, 25, 76, or a sequence that is at least 70%, at least 75%, at least 80%, at least 85%, at least 90%, at least 90%, at least 91%, at least 92%, at least 93%, at least 94%, at least 95%, at least 96%, at least 97%, at least 98%, or at least 99% identical to one of SEQ ID NOs: 9, 14, 18, 25, 76 that maintains the same function or a codon-optimized version of one of SEQ ID NOs: 9, 14, 18, 25, 76. In some embodiments of any of the aspects, the detectable marker of a CAR polypeptide as described herein is encoded by a nucleic acid sequence comprising SEQ ID NOs: 9, 14, 18, 25, 76, or a sequence that is at least 95% identical to one of SEQ ID NOs: 9, 14, 18, 25, 76 that maintains the same function.

[0480] In some embodiments of any of the aspects, the detectable marker can be located anywhere within a CAR polypeptide as described herein. In one embodiment, the detectable marker is located between any domain of a CAR polypeptide as described herein, but is not found within a functional domain or does not disrupt the function of a domain. In some embodiments of any of the aspects, the detectable marker is located adjacent to and C terminal of the extracellular binding domain. Such a marker can be used to detect the expression of the CAR polypeptide, including the cell surface expression. In some embodiments of any of the aspects, the detectable marker is located adjacent to and C terminal of the extracellular binding domain and N terminal of the transmembrane domain (and hinge domain if present). In some embodiments of any of the aspects, the detectable marker that is located adjacent to and C terminal of the extracellular binding domain comprises the V5 tag, the Myc tag, or any other marker as described herein.

[0481] In some embodiments of any of the aspects, the detectable marker is located between the repressible protease and a protease cleavage site; such a marker can be used to detect the cleavage and/or expression of the CAR polypeptide. In some embodiments of any of the aspects, the detectable marker that is located between the repressible protease and a protease cleavage site comprises the AU1 tag, the HA1 tag, or any other marker as described herein.

[0482] In some embodiments of any of the aspects, the detectable marker is located adjacent and N-terminal to the repressible protease. In some embodiments of any of the aspects, the detectable marker is located adjacent and N-terminal to the repressible protease and C-terminal to a first protease cleavage site. In some embodiments of any of the aspects, the detectable marker is located adjacent to and C terminal to the repressible protease. In some embodiments of any of the aspects, the detectable marker is located adjacent to and C terminal to the repressible protease and N-terminal to a second protease cleavage site.

[0483] In some embodiments of any of the aspects, the detectable marker is located at the C-terminal end of the polypeptide. Such a marker can be used to detect the intracellular expression of the CAR polypeptide. In some embodiments of any of the aspects, the detectable marker located at the C-terminal end of the polypeptide comprises mCherry or another marker as described herein.

[0484] In some embodiments of any of the aspects, CAR polypeptides as described herein, especially those that are administered to a subject or those that are part of a pharmaceutical composition, do not comprise detectable markers that are immunogenic. In some embodiments of any of the aspects, CAR polypeptides as described herein do not comprise GFP, mCherry, HA1, or any other immunogenic markers.

[0485] In one aspect described herein is an ON-switch (also referred to as a drug-inducible) CAR polypeptide comprising: (a) an extracellular binding domain; (b) a transmembrane domain; (c) at least one intracellular signaling domain; and (d) a repressible protease. In some embodiments of any of the aspects, the extracellular binding domain (e.g., of the ON-switch CAR polypeptide) is N-terminal to the transmembrane domain, and the transmembrane domain to N-terminal to the intracellular domains (e.g., at least one intracellular signaling domain and a repressible protease). In some embodiments of any of the aspects, the at least one intracellular signaling domain (e.g., of the ON-switch CAR polypeptide) is N-terminal to the repressible protease. In some embodiments of any of the aspects, the repressible protease (e.g., of the ON-switch CAR polypeptide) is N-terminal to the at least one intracellular signaling domain. In some embodiments of any of the aspects, the repressible protease (e.g., of the ON-switch CAR polypeptide) is N-terminal to at least one intracellular signaling domain and C-terminal to at least one intracellular signaling domain.

[0486] In some embodiments of any of the aspects, the drug-inducible CAR polypeptide comprises 1, 2, 3, 4, 5, or more repressible protease(s). In some embodiments of any of the aspects, the drug-inducible CAR polypeptide comprises one repressible protease. In embodiments comprising multiple repressible proteases, the multiple repressible proteases can be different individual repressible proteases or multiple copies of the same repressible protease, or a combination of the foregoing. In some embodiments of any of the aspects, the drug-inducible CAR polypeptide comprises 1, 2, 3, 4, 5, or more intracellular signaling domains. In embodiments comprising multiple intracellular signaling domains, the multiple repressible proteases can be different individual intracellular signaling domains or multiple copies of the same intracellular signaling domain, or a combination of the foregoing. In some embodiments of any of the aspects, the repressible protease (e.g., of the ON-switch CAR polypeptide) is located: (a) between the transmembrane domain and the first intracellular signaling domain; (b) between the first intracellular signaling domain and the second intracellular signaling domain; or (c) between the second intracellular signaling domain and the third intracellular signaling domain.

[0487] In some embodiments of any of the aspects, the repressible protease (e.g., of the ON-switch CAR polypeptide) is located: (a) between the transmembrane domain and the first intracellular signaling domain. In some embodiments of any of the aspects, the repressible protease (e.g., of the ON-switch CAR polypeptide) is located: (b) between the first intracellular signaling domain and the second intracellular signaling domain. In some embodiments of any of the aspects, the repressible protease (e.g., of the ON-switch CAR polypeptide) is located: (c) between the second intracellular signaling domain and the third intracellular signaling domain.

[0488] In some embodiments of any of the aspects, the repressible protease (e.g., of the ON-switch CAR polypeptide) is located: (a) between the transmembrane domain and the first intracellular signaling domain; and (b) between the first intracellular signaling domain and the second intracellular signaling domain. In some embodiments of any of the aspects, the repressible protease (e.g., of the ON-switch CAR polypeptide) is located: (a) between the transmembrane domain and the first intracellular signaling domain; and (c) between the second intracellular signaling domain and the third intracellular signaling domain. In some embodiments of any of the aspects, the repressible protease (e.g., of the ON-switch CAR polypeptide) is located: (b) between the first intracellular signaling domain and the second intracellular signaling domain; and (c) between the second intracellular signaling domain and the third intracellular signaling domain. In some embodiments of any of the aspects, the repressible protease (e.g., of the ON-switch CAR polypeptide) is located: (a) between the transmembrane domain and the first intracellular signaling domain; (b) between the first intracellular signaling domain and the second intracellular signaling domain; and (c) between the second intracellular signaling domain and the third intracellular signaling domain.

[0489] In some embodiments of any of the aspects, the repressible protease (e.g., of the ON-switch CAR polypeptide) is hepatitis C virus (HCV) nonstructural protein 3 (NS3). In one embodiment, the repressible protease of the ON-switch CAR polypeptide comprises NS3 genotype 1A (e.g., SEQ ID NO: 16, 49). In some embodiments of any of the aspects, the repressible protease of an ON-switch CAR polypeptide as described herein comprises SEQ ID NO: 49, or an amino acid sequence that is at least 70%, at least 75%, at least 80%, at least 85%, at least 90%, at least 90%, at least 91%, at least 92%, at least 93%, at least 94%, at least 95%, at least 96%, at least 97%, at least 98%, or at least 99% identical to the sequence of SEQ ID NO: 49 that maintains the same function. In some embodiments of any of the aspects, the repressible protease of an ON-switch CAR polypeptide as described herein comprises SEQ ID NO: 49, or an amino acid sequence that is at least 95% identical to the sequence of SEQ ID NO: 49 that maintains the same function.

[0490] In some embodiments of any of the aspects, the repressible protease of an ON-switch CAR polypeptide as described herein is encoded by a nucleic acid sequence comprising SEQ ID NO: 16, or a sequence that is at least 70%, at least 75%, at least 80%, at least 85%, at least 90%, at least 90%, at least 91%, at least 92%, at least 93%, at least 94%, at least 95%, at least 96%, at least 97%, at least 98%, or at least 99% identical to SEQ ID NO: 16 that maintains the same function or a codon-optimized version of SEQ ID NO: 16. In some embodiments of any of the aspects, the repressible protease of an ON-switch CAR polypeptide as described herein is encoded by a nucleic acid sequence comprising SEQ ID NO: 16, or a sequence that is at least 95% identical to SEQ ID NO: 16 that maintains the same function.

[0491] In some embodiments of any of the aspects, the repressible protease of the ON-switch CAR polypeptide is catalytically active. For NS3 genotype 1A, the catalytic triad comprises His-57, Asp-81, and Ser-139. In regard to a repressible protease, “catalytically active” refers to the ability to cleave at a protease cleavage site. In some embodiments of any of the aspects, the repressible protease (e.g., of the ON-switch CAR polypeptide) can be any repressible protease as described further herein.

[0492] In some embodiments of any of the aspects, the ON-switch CAR polypeptide further comprises a cofactor for the repressible protease. In some embodiments of any of the aspects, the cofactor (e.g., for NS3) is an HSV NS4A domain, as described further herein. In one embodiment, the ON-switch CAR polypeptide comprises genotype 1A NS4A (e.g., SEQ ID NO: 15, 48). In some embodiments of any of the aspects, the HSV NS4A domain is adjacent and N-terminal to the repressible protease (e.g., NS3).

[0493] In some embodiments of any of the aspects, the cofactor for the repressible protease of an ON-switch CAR polypeptide as described herein comprises SEQ ID NO: 48, or an amino acid sequence that is at least 70%, at least 75%, at least 80%, at least 85%, at least 90%, at least 90%, at least 91%, at least 92%, at least 93%, at least 94%, at least 95%, at least 96%, at least 97%, at least 98%, or at least 99% identical to the sequence of SEQ ID NO: 48 that maintains the same function. In some embodiments of any of the aspects, the cofactor for the repressible protease of an ON-switch CAR polypeptide as described herein comprises SEQ ID NO: 48, or an amino acid sequence that is at least 95% identical to the sequence of SEQ ID NO: 48 that maintains the same function.

[0494] In some embodiments of any of the aspects, the cofactor for the repressible protease of an ON-switch CAR polypeptide as described herein is encoded by a nucleic acid sequence comprising SEQ ID NO: 15, or a sequence that is at least 70%, at least 75%, at least 80%, at least 85%, at least 90%, at least 90%, at least 91%, at least 92%, at least 93%, at least 94%, at least 95%, at least 96%, at least 97%, at least 98%, or at least 99% identical to SEQ ID NO: 15 that maintains the same function or a codon-optimized version of SEQ ID NO: 15. In some embodiments of any of the aspects, the cofactor for the repressible protease of an ON-switch CAR polypeptide as described herein is encoded by a nucleic acid sequence comprising SEQ ID NO: 15, or a sequence that is at least 95% identical to SEQ ID NO: 15 that maintains the same function.

[0495] In some embodiments of any of the aspects, the ON-switch CAR polypeptide further comprises at least one protease cleavage site. As a non-limiting example, the ON-switch CAR polypeptide can comprise 1, 2, 3, 4, 5, or more protease cleavage sites, in between or within any domain(s) as described herein. In one embodiment, the ON-switch CAR polypeptide comprises two protease cleavage sites. In some embodiments of any of the aspects, the repressible protease and the at least one protease cleavage site are located adjacent to each other in the same contiguous polypeptide. In some embodiments of any of the aspects, a first protease cleavage site is located 5′ or N-terminal of the repressible protease. In some embodiments of any of the aspects, a second protease cleavage site is located 3′ or C-terminal of the repressible protease. In some embodiments of any of the aspects, the protease cleavage site of the ON-switch CAR polypeptide comprises an NS5A/5B cut site (SEQ ID NO: 12, 45) and/or an NS4A/5B cut site (SEQ ID NO: 17, 50), or any other protease cleavage site as described herein. In some embodiments of any of the aspects, the ON-switch CAR polypeptide comprises an NS5A/5B cut site (SEQ ID NO: 12, 45)N-terminal of the repressible, and an NS4A/5B cut site (SEQ ID NO: 17, 50)C-terminal of the repressible protease. In some embodiments of any of the aspects, the repressible protease and the at least one protease cleavage site are not necessarily located adjacent to each other in the same contiguous polypeptide.

[0496] In some embodiments of any of the aspects, the protease cleavage site of an ON-switch CAR polypeptide as described herein comprises SEQ ID NOs: 45 or 50, or an amino acid sequence that is at least 70%, at least 75%, at least 80%, at least 85%, at least 90%, at least 90%, at least 91%, at least 92%, at least 93%, at least 94%, at least 95%, at least 96%, at least 97%, at least 98%, or at least 99% identical to the sequence of one of SEQ ID NOs: 45 or 50 that maintains the same functions as one of SEQ ID NOs: 45 or 50. In some embodiments of any of the aspects, the protease cleavage site of an ON-switch CAR polypeptide as described herein comprises SEQ ID NOs: 45 or 50, or an amino acid sequence that is at least 95% identical to the sequence of one of SEQ ID NOs: 45 or 50 that maintains the same function.

[0497] In some embodiments of any of the aspects, the protease cleavage site of an ON-switch CAR polypeptide as described herein is encoded by a nucleic acid sequence comprising SEQ ID NOs: 12 or 17, or a sequence that is at least 70%, at least 75%, at least 80%, at least 85%, at least 90%, at least 90%, at least 91%, at least 92%, at least 93%, at least 94%, at least 95%, at least 96%, at least 97%, at least 98%, or at least 99% identical to one of SEQ ID NOs: 12 or 17 that maintains the same function or a codon-optimized version of one of SEQ ID NO: 12 or 17. In some embodiments of any of the aspects, the protease cleavage site of an ON-switch CAR polypeptide as described herein is encoded by a nucleic acid sequence comprising SEQ ID NOs: 12 or 17, or a sequence that is at least 95% identical to one of SEQ ID NOs: 12 or 17 that maintains the same function.

[0498] In some embodiments of any of the aspects, the at least one protease cleavage site (e.g., of the ON-switch CAR polypeptide) is located: (a) between the transmembrane domain and the first intracellular signaling domain; (b) between the first intracellular signaling domain and the second intracellular signaling domain; or (c) between the second intracellular signaling domain and the third intracellular signaling domain. In some embodiments of any of the aspects, the at least one protease cleavage site (e.g., of the ON-switch CAR polypeptide) is located: (a) between the transmembrane domain and the first intracellular signaling domain. In some embodiments of any of the aspects, the at least one protease cleavage site (e.g., of the ON-switch CAR polypeptide) is located: (b) between the first intracellular signaling domain and the second intracellular signaling domain. In some embodiments of any of the aspects, the at least one protease cleavage site (e.g., of the ON-switch CAR polypeptide) is located: (c) between the second intracellular signaling domain and the third intracellular signaling domain. In some embodiments of any of the aspects, the at least one protease cleavage site (e.g., of the ON-switch CAR polypeptide) is located: (a) between the transmembrane domain and the first intracellular signaling domain; and (b) between the first intracellular signaling domain and the second intracellular signaling domain. In some embodiments of any of the aspects, the at least one protease cleavage site (e.g., of the ON-switch CAR polypeptide) is located: (a) between the transmembrane domain and the first intracellular signaling domain; and (c) between the second intracellular signaling domain and the third intracellular signaling domain. In some embodiments of any of the aspects, the at least one protease cleavage site (e.g., of the ON-switch CAR polypeptide) is located: (b) between the first intracellular signaling domain and the second intracellular signaling domain; and (c) between the second intracellular signaling domain and the third intracellular signaling domain. In some embodiments of any of the aspects, the at least one protease cleavage site (e.g., of the ON-switch CAR polypeptide) is located: (a) between the transmembrane domain and the first intracellular signaling domain; (b) between the first intracellular signaling domain and the second intracellular signaling domain; and (c) between the second intracellular signaling domain and the third intracellular signaling domain.

[0499] In some embodiments of any of the aspects, the ON-switch CAR polypeptide is cleaved when a protease inhibitor is not bound to the repressible protease. In some embodiments of any of the aspects, the protease cleavage site is located or engineered such that, when the ON-switch CAR polypeptide cleaves itself in the absence of a protease inhibitor, the resulting amino acid at the N-terminus of the newly cleaved polypeptide(s) causes the polypeptide(s) to degrade at a faster rate and have a shorter half-life compared to other cleaved polypeptides, according to the N-end rule as described further herein. In one embodiment, the N-terminal amino acid of the cleaved polypeptide (e.g., the ON-switch CAR polypeptide) is histidine. In some embodiments of any of the aspects, the amino acid immediately C-terminal of the cleavage site is a histidine.

[0500] In some embodiments of any of the aspects, the ON-switch CAR polypeptide is in combination with a protease inhibitor bound to the repressible protease. In some embodiments of any of the aspects, the ON-switch CAR polypeptide is bound to a protease inhibitor bound to the repressible protease. In some embodiments of any of the aspects, the ON-switch CAR polypeptide is bound specifically to a protease inhibitor bound to the repressible protease. Non-limiting examples of protease inhibitors (e.g., for NS3) include grazoprevir (GZV), danoprevir, simeprevir, asunaprevir, ciluprevir, boceprevir, sovaprevir, paritaprevir, ombitasvir, paritaprevir, ritonavir, dasabuvir, and telaprevir; further examples are described herein. In some embodiments of any of the aspects, the ON-switch CAR polypeptide is not cleaved (i.e., does not cleave itself) when the protease inhibitor is bound to the repressible protease.

[0501] In some embodiments of any of the aspects, the ON-switch CAR polypeptide is referred to as a “version 1” or “V 1” polypeptide. In some embodiments of any of the aspects, the V 1 CAR polypeptide comprises from the N-terminus to the C-terminus: (a) an extracellular binding domain; (b) a transmembrane domain; (c) a first protease cleavage site; (d) a repressible protease; (e) a second protease cleavage site; and (f) at least one intracellular signaling domain. In some embodiments of any of the aspects, the V1 CAR polypeptide comprises 1, 2, 3, 4, or at least 5 intracellular signaling domains. In some embodiments of any of the aspects, the V1 CAR polypeptide does not comprise the first protease cleavage site but does comprise the second protease cleavage site. In some embodiments of any of the aspects, the V1 CAR polypeptide does not comprise the second protease cleavage site but does comprise the first protease cleavage site.

[0502] In some embodiments of any of the aspects, the V1 CAR polypeptide comprises from the N-terminus to the C-terminus: (a) an extracellular binding domain; (b) a transmembrane domain; (c) a first protease cleavage site; (d) a repressible protease; (e) a second protease cleavage site; (f) a first intracellular signaling domain; (g) a second intracellular signaling domain; and (h) a third intracellular signaling domain. In some embodiments of any of the aspects, the first, second, and third intracellular signaling domains comprise the intracellular signaling domains of CD28, 4-1BB, and CD3zeta, respectively. In some embodiments of any of the aspects, the V 1 CAR polypeptide comprises SEQ ID NO: 34 or an amino acid sequence that is at least 70%, at least 75%, at least 80%, at least 85%, at least 90%, at least 90%, at least 91%, at least 92%, at least 93%, at least 94%, at least 95%, at least 96%, at least 97%, at least 98%, or at least 99% identical to the sequence of SEQ ID NO: 34 that maintains the same functions as SEQ ID NO: 34 (e.g., target cell binding, CD3zeta signaling, etc.). In some embodiments of any of the aspects, the V1 CAR polypeptide comprises SEQ ID NO: 34 or an amino acid sequence that is at least 95% identical to the sequence of SEQ ID NO: 34 that maintains the same function.

[0503] In some embodiments of any of the aspects, the V1 CAR polypeptide is encoded by a nucleic acid sequence comprising SEQ ID NO: 1 or a sequence that is at least 70%, at least 75%, at least 80%, at least 85%, at least 90%, at least 90%, at least 91%, at least 92%, at least 93%, at least 94%, at least 95%, at least 96%, at least 97%, at least 98%, or at least 99% identical to SEQ ID NO: 1 that maintains the same function or a codon-optimized version of SEQ ID NO: 1. In some embodiments of any of the aspects, the V1 CAR polypeptide is encoded by a nucleic acid sequence comprising SEQ ID NO: 1 or a sequence that is at least 95% identical to SEQ ID NO: 1 that maintains the same function.

[0504] In some embodiments of any of the aspects, the ON-switch CAR polypeptide is referred to as a “version 2” or “V2” polypeptide. In some embodiments of any of the aspects, the V2 CAR polypeptide comprises from the N-terminus to the C-terminus: (a) an extracellular binding domain; (b) a transmembrane domain; (c) at least one intracellular signaling domain; (d) a first protease cleavage site; (e) a repressible protease; (f) a second protease cleavage site; and (g) at least one intracellular signaling domain. In some embodiments of any of the aspects, the V2 CAR polypeptide comprises 1, 2, 3, 4, or at least 5 intracellular signaling domains. In some embodiments of any of the aspects, the V2 CAR polypeptide does not comprise the first protease cleavage site but does comprise the second protease cleavage site. In some embodiments of any of the aspects, the V2 CAR polypeptide does not comprise the second protease cleavage site but does comprise the first protease cleavage site.

[0505] In some embodiments of any of the aspects, the V2 CAR polypeptide comprises from the N-terminus to the C-terminus: (a) an extracellular binding domain; (b) a transmembrane domain; (c) a first intracellular signaling domain; (d) a first protease cleavage site; (e) a repressible protease; (f) a second protease cleavage site; (g) a second intracellular signaling domain; and (h) a third intracellular signaling domain. In some embodiments of any of the aspects, the first, second, and third intracellular signaling domains comprise the intracellular signaling domains of CD28, 4-1BB, and CD3zeta, respectively.

[0506] In some embodiments of any of the aspects, the V2 CAR polypeptide comprises SEQ ID NO: 35 or an amino acid sequence that is at least 70%, at least 75%, at least 80%, at least 85%, at least 90%, at least 90%, at least 91%, at least 92%, at least 93%, at least 94%, at least 95%, at least 96%, at least 97%, at least 98%, or at least 99% identical to the sequence of SEQ ID NO: 35 that maintains the same functions as SEQ ID NO: 35 (e.g., target cell binding, CD3zeta signaling, etc.). In some embodiments of any of the aspects, the V2 CAR polypeptide comprises SEQ ID NO: 35 or an amino acid sequence that is at least 95% identical to the sequence of SEQ ID NO: 35 that maintains the same function.

[0507] In some embodiments of any of the aspects, the V2 CAR polypeptide is encoded by a nucleic acid sequence comprising SEQ ID NO: 2 or a sequence that is at least 70%, at least 75%, at least 80%, at least 85%, at least 90%, at least 90%, at least 91%, at least 92%, at least 93%, at least 94%, at least 95%, at least 96%, at least 97%, at least 98%, or at least 99% similar to SEQ ID NO: 2 that maintains the same function or a codon-optimized version of SEQ ID NO: 2. In some embodiments of any of the aspects, the V2 CAR polypeptide is encoded by a nucleic acid sequence comprising SEQ ID NO: 2 or a sequence that is at least 95% similar to SEQ ID NO: 2 that maintains the same function.

[0508] In some embodiments of any of the aspects, the ON-switch CAR polypeptide is referred to as a “version 3” or “V3” polypeptide. In some embodiments of any of the aspects, the V3 CAR polypeptide comprises from the N-terminus to the C-terminus: (a) an extracellular binding domain; (b) a transmembrane domain; (c) at least one intracellular signaling domain; (d) a first protease cleavage site; (e) a repressible protease; (f) a second protease cleavage site; and (g) at least one intracellular signaling domain. In some embodiments of any of the aspects, the V3 CAR polypeptide comprises 1, 2, 3, 4, or at least 5 intracellular signaling domains. In some embodiments of any of the aspects, the V3 CAR polypeptide does not comprise the first protease cleavage site but does comprise the second protease cleavage site. In some embodiments of any of the aspects, the V3 CAR polypeptide does not comprise the second protease cleavage site but does comprise the first protease cleavage site.

[0509] In some embodiments of any of the aspects, the V3 CAR polypeptide comprises from the N-terminus to the C-terminus: (a) an extracellular binding domain; (b) a transmembrane domain; (c) a first intracellular signaling domain; (d) a second intracellular signaling domain; (e) a first protease cleavage site; (f) a repressible protease; (g) a second protease cleavage site; and (h) a third intracellular signaling domain. In some embodiments of any of the aspects, the first, second, and third intracellular signaling domains comprise the intracellular signaling domains of CD28, 4-1BB, and CD3zeta, respectively.

[0510] In some embodiments of any of the aspects, the V3 CAR polypeptide comprises SEQ ID NO: 36 or an amino acid sequence that is at least 70%, at least 75%, at least 80%, at least 85%, at least 90%, at least 90%, at least 91%, at least 92%, at least 93%, at least 94%, at least 95%, at least 96%, at least 97%, at least 98%, or at least 99% identical to the sequence of SEQ ID NO: 36 that maintains the same functions as SEQ ID NO: 36 (e.g., target cell binding, CD3zeta signaling, etc.). In some embodiments of any of the aspects, the V3 CAR polypeptide comprises SEQ ID NO: 36 or an amino acid sequence that is at least 95% identical to the sequence of SEQ ID NO: 36 that maintains the same function.

[0511] In some embodiments of any of the aspects, the V3 CAR polypeptide is encoded by a nucleic acid sequence comprising SEQ ID NO: 3 or a sequence that is at least 70%, at least 75%, at least 80%, at least 85%, at least 90%, at least 90%, at least 91%, at least 92%, at least 93%, at least 94%, at least 95%, at least 96%, at least 97%, at least 98%, or at least 99% similar to SEQ ID NO: 3 that maintains the same function or a codon-optimized version of SEQ ID NO: 3. In some embodiments of any of the aspects, the V3 CAR polypeptide is encoded by a nucleic acid sequence comprising SEQ ID NO: 3 or a sequence that is at least 95% similar to SEQ ID NO: 3 that maintains the same function.

[0512] In some embodiments of any of the aspects, the extracellular binding domain of the ON-switch CAR polypeptide is an antibody, an antigen-binding fragment thereof, a F(ab) fragment, a F(ab′) fragment, a single chain variable fragment (scFv), or a single-domain antibody (sdAb). In some embodiments of any of the aspects, the extracellular binding domain of the ON-switch CAR polypeptide comprises a scFv. In some embodiments of any of the aspects, the extracellular binding domain of the ON-switch CAR polypeptide specifically binds to a tumor antigen, as described further herein. In some embodiments of any of the aspects, the ON-switch CAR polypeptide comprises a leading peptide located N-terminal to the extracellular binding domain. In some embodiments of any of the aspects, the leading peptide is CD8alpha leading peptide or another leading peptide as described herein.

[0513] In some embodiments of any of the aspects, the transmembrane domain is located between the extracellular binding domain and the at least one intracellular signaling domain. The transmembrane domain of the ON-switch CAR polypeptide can be any known transmembrane domain. In one embodiment, the transmembrane domain of the ON-switch CAR polypeptide comprises the transmembrane domain of CD28. In some embodiments of any of the aspects, the ON-switch CAR polypeptide comprises a spacer domain located between the extracellular binding domain and the transmembrane domain. In some embodiments of any of the aspects, the spacer domain comprises a CD8a hinge domain or another spacer domain as described herein.

[0514] In some embodiments of any of the aspects, the ON-switch CAR polypeptide comprises 1, 2, 3, 4, 5, or more intracellular signaling domains. In some embodiments of any of the aspects, the at least one intracellular signaling domain (e.g., of the ON-switch CAR polypeptide) comprises a first and second intracellular signaling domains (e.g., a second generation CAR). In some embodiments of any of the aspects, the at least one intracellular signaling domain (e.g., of the ON-switch CAR polypeptide) comprises a first, second, and third intracellular signaling domains (e.g., a third or fourth generation CAR). In some embodiments of any of the aspects, each of the at least one intracellular signaling domains (e.g., of the ON-switch CAR polypeptide) independently comprises an intracellular signaling domain selected from the group consisting of: TCRC; FcRy; FcRp; CD3zeta; CD3y; CD35; CD3s; CD3C; CD22; CD79a; CD79b; CD66d; CARD11; CD2; CD7; CD27; CD28; CD30; CD40; CD54 (ICAM); CD83; CD134 (OX40); CD137 (4-1BB); CD150 (SLAMF1); CD152 (CTLA4); CD223 (LAG3); CD270 (HVEM); CD273 (PD-L2); CD274 (PD-Ll); CD278 (ICOS); DAP10; LAT; KD2C SLP76; TRIM; ZAP70; and 41BB. In some embodiments of any of the aspects, the first, second, and third intracellular signaling domains (e.g., of the V1, V2, and V3 CARs) comprise the intracellular signaling domains of CD28, 4-1BB, and CD3zeta, respectively.

[0515] In some embodiments of any of the aspects, the ON-switch CAR polypeptide comprises at least one detectable marker as described herein. As a non-limiting example, the at least one detectable marker can be used to detect the expression of the CAR and/or the cleavage or degradation of the ON-switch CAR polypeptide. In some embodiments of any of the aspects, the ON-switch CAR polypeptide comprises a detectable marker adjacent to and C terminal of the extracellular binding domain. In some embodiments of any of the aspects, the ON-switch CAR polypeptide comprises a detectable marker adjacent and N-terminal to the repressible protease. In some embodiments of any of the aspects, the ON-switch CAR polypeptide comprises a detectable marker adjacent to and C terminal to the repressible protease. As a non-limiting example, the detectable marker(s) can be selected from GFP, V5, HA1, Myc, VSV-G, HSV, FLAG, HIS, mCherry, AU1, and biotin or another detectable marker as described herein (see e.g., Table 1).

[0516] In some embodiments of any of the aspects, an ON-switch CAR polypeptide as described herein is encoded by a nucleic acid sequence comprising one of SEQ ID NOs: 1-3 or a nucleic acid sequence that is at least 70%, at least 75%, at least 80%, at least 85%, at least 90%, at least 90%, at least 91%, at least 92%, at least 93%, at least 94%, at least 95%, at least 96%, at least 97%, at least 98%, or at least 99% identical to the sequence of one of SEQ ID NOs: 1-3. In some embodiments of any of the aspects, an ON-switch CAR polypeptide as described herein is encoded by a nucleic acid sequence that is at least 95% identical to the sequence of one of SEQ ID NOs: 1-3.

[0517] In some embodiments of any of the aspects, an ON-switch CAR polypeptide as described herein comprises one of SEQ ID NOs: 34-36 or an amino acid sequence that is at least 70%, at least 75%, at least 80%, at least 85%, at least 90%, at least 90%, at least 91%, at least 92%, at least 93%, at least 94%, at least 95%, at least 96%, at least 97%, at least 98%, or at least 99% identical to the sequence of one of SEQ ID NOs: 34-36 that maintains the same functions as the sequence selected from SEQ ID NOs: 34-36 (e.g., target cell binding, CD3zeta signaling, etc.). In some embodiments of any of the aspects, an ON-switch CAR polypeptide as described herein comprises an amino acid sequence that is at least 95% identical to the sequence of one of SEQ ID NOs: 34-36 that maintains the same function.

[0518] Table 1 shows the locations of specific domains in exemplary ON-Switch CAR sequences. The nucleic acid numbers are shown first, followed by the amino acid residues.

TABLE 1
ON-Switch CAR Sequences

| | NS3CAR-V1 (SEQ | NS3CAR-V2 (SEQ | NS3CAR-V3 (SEQ | Traditional CAR (SEQ |
|---|---|---|---|---|
| Element (SEQ ID NOs) | ID NO: 1, 34) | ID NO: 2, 35) | ID NO: 3, 36) | ID NO: 4, 37) |
| CD8a leading | 1-63, 1-20 | 1-63, 1-20 | 1-63, 1-20 | 1-63, 1-20 |
| peptide (7, 40) | | | | |
| H3B1 scFv (8, 41) | 64-891, 21-296 | 64-891, 21-296 | 64-891, 21-296 | 64-891, 21-296 |
| V5 tag (9, 42) | 892-933, 297-310 | 892-933, 297-310 | 892-933, 297-310 | 892-933, 297-310 |
| CD8 hinge (10, 43) | 946-1080, 315-359 | 946-1080, 315-359 | 946-1080, 315-359 | 946-1080, 315-359 |
| CD28 transmembrane | 1081-1161, 360-386 | 1081-1161, 360-386 | 1081-1161, 360-386 | 1081-1161, 360-386 |
| (11, 44) | | | | |
| NS5A/5B cut site | 1162-1191, 387-396 | 1285-1314, 428-437 | 1411-1440, 470-479 | |
| (CC) (12, 45) | | | | |
| N-end rule (13, 46) | 1180-1203, 393-400 | 1303-1326, 434-441 | 1429-1452, 476-483 | |
| AU1 (14, 47) | 1213-1230, 404-409 | 1336-1353, 445-450 | 1462-1479, 487-492 | |
| NS4A (15, 48) | 1246-1484, 415-427 | 1369-1407, 456-468 | 1495-1533, 498-510 | |
| NS3 (16, 49) | 1297-1863, 432-620 | 1420-1986, 473-661 | 1546-2112, 515-703 | |
| NS4A/4B cut site | 1915-1956, 638-651 | 2038-2079, 679-692 | 2164-2205, 722-735 | |
| (CS) (17, 50) | | | | |
| HA1 (18, 51) | 1957-1983, 652-660 | 2080-2106, 693-701 | 2206-2232, 735-743 | |
| CD28 ICD (19, 52) | 1984-2106, 661-701 | 1162-1284, 387-427 | 1162-1284, 387-427 | 1162-1284, 387-427 |
| 41BB ICD (20, 53) | 2107-2232, 702-743 | 2107-2232, 702-743 | 1285-1410, 428-469 | 1285-1410, 428-469 |
| CD3z ICD (21, 54) | 2233-2568, 744-855 | 2233-2568, 744-855 | 2233-2568, 744-855 | 1411-1746, 470-581 |

[0519] In several aspects, described herein are two-component CAR polypeptide systems, with one CAR polypeptide comprising a repressible protease and at least one intracellular signalling domain, and a second CAR polypeptide comprising a degron domain and at least one other intracellular signalling domain. Such a two-component CAR polypeptide system can also be referred to as an “AND logic gate” or simply “AND gate.” AND gates have two inputs. The output of an AND gate is on only if both inputs are on. If at least one of the inputs are off, the output will be off. Accordingly, a two-component CAR polypeptide system does not result in intracellular signalling if either of the two polypeptides are absent or inactive or their cognate antigens are not both present in close proximity on a target cell. As a non-limiting example, the AND-gate CAR system described herein is functional and results in intracellular signaling only in the presence of a protease inhibitor and a degron stabilizer. Such an AND-gate CAR allows for fine-tuned control of CAR activation through modulating the levels of the first polypeptide, the second polypeptide, the protease inhibitor, and the degron stabilizer.

[0520] In one aspect described herein is a first polypeptide of an AND-gate CAR system, comprising: (a) an extracellular binding domain; (b) a transmembrane domain; (c) a repressible protease; and (d) an intracellular signaling domain. In some embodiments of any of the aspects, the extracellular binding domain (e.g., of the first polypeptide of an AND-gate CAR system) is N-terminal to the transmembrane domain, and the transmembrane domain to N-terminal to the intracellular domains (e.g., intracellular signalling domain and the repressible protease). In some embodiments of any of the aspects, the intracellular signaling domain (e.g., of the first polypeptide of an AND-gate CAR system) is N-terminal to the repressible protease. In some embodiments of any of the aspects, the repressible protease (e.g., of the first polypeptide of an AND-gate CAR system) is N-terminal to the intracellular signaling domain.

[0521] In some embodiments of any of the aspects, the first AND-gate CAR polypeptide comprises 1, 2, 3, 4, 5, or more repressible protease(s). In one embodiment, the first AND-gate CAR polypeptide comprises one repressible protease. In embodiments comprising multiple repressible proteases, the multiple repressible proteases can be different individual repressible proteases or multiple copies of the same repressible protease, or a combination of the foregoing. In some embodiments of any of the aspects, the repressible protease (e.g., of the first AND-gate CAR polypeptide) is located between the transmembrane domain and the intracellular signaling domain.

[0522] In some embodiments of any of the aspects, the repressible protease (e.g., of the first AND-gate CAR polypeptide) is hepatitis C virus (HCV) nonstructural protein 3 (NS3). In one embodiment, the repressible protease of the first AND-gate CAR polypeptide comprises NS3 genotype 1A (e.g., SEQ ID NO: 16, 49). In some embodiments of any of the aspects, the repressible protease of the first AND-gate CAR polypeptide as described herein comprises SEQ ID NO: 49, or an amino acid sequence that is at least 70%, at least 75%, at least 80%, at least 85%, at least 90%, at least 90%, at least 91%, at least 92%, at least 93%, at least 94%, at least 95%, at least 96%, at least 97%, at least 98%, or at least 99% identical to the sequence of SEQ ID NO: 49 that maintains the same function. In some embodiments of any of the aspects, the repressible protease of the first AND-gate CAR polypeptide as described herein comprises SEQ ID NO: 49, or an amino acid sequence that is at least 95% identical to the sequence of SEQ ID NO: 49 that maintains the same function.

[0523] In some embodiments of any of the aspects, the repressible protease of the first AND-gate CAR polypeptide as described herein is encoded by a nucleic acid sequence comprising SEQ ID NO: 16, or a sequence that is at least 70%, at least 75%, at least 80%, at least 85%, at least 90%, at least 90%, at least 91%, at least 92%, at least 93%, at least 94%, at least 95%, at least 96%, at least 97%, at least 98%, or at least 99% identical to SEQ ID NO: 16 that maintains the same function or a codon-optimized version of SEQ ID NO: 16. In some embodiments of any of the aspects, the repressible protease the first AND-gate CAR polypeptide as described herein is encoded by a nucleic acid sequence comprising SEQ ID NO: 16, or a sequence that is at least 95% identical to SEQ ID NO: 16 that maintains the same function.

[0524] In some embodiments of any of the aspects, the repressible protease of the first AND-gate CAR polypeptide is catalytically active. For NS3 genotype 1A, the catalytic triad comprises His-57, Asp-81, and Ser-139. In regard to a repressible protease, “catalytically active” refers to the ability to cleave at a protease cleavage site. In some embodiments of any of the aspects, the repressible protease (e.g., of the first AND-gate CAR polypeptide) can be any repressible protease as described further herein.

[0525] In some embodiments of any of the aspects, the first AND-gate CAR polypeptide further comprises a cofactor for the repressible protease. In some embodiments of any of the aspects, the cofactor (e.g., for NS3) is an HSV NS4A domain, as described further herein. In one embodiment, the first AND-gate CAR polypeptide comprises genotype 1A NS4A (e.g., SEQ ID NO: 15, 48). In some embodiments of any of the aspects, the HSV NS4A domain is adjacent and N-terminal to the repressible protease (e.g., NS3).

[0526] In some embodiments of any of the aspects, the cofactor for the repressible protease of the first AND-gate CAR polypeptide as described herein comprises SEQ ID NO: 48, or an amino acid sequence that is at least 70%, at least 75%, at least 80%, at least 85%, at least 90%, at least 90%, at least 91%, at least 92%, at least 93%, at least 94%, at least 95%, at least 96%, at least 97%, at least 98%, or at least 99% identical to the sequence of SEQ ID NO: 48 that maintains the same function. In some embodiments of any of the aspects, the cofactor for the repressible protease of first AND-gate CAR polypeptide as described herein comprises SEQ ID NO: 48, or an amino acid sequence that is at least 95% identical to the sequence of SEQ ID NO: 48 that maintains the same function.

[0527] In some embodiments of any of the aspects, the cofactor for the repressible protease of the first AND-gate CAR polypeptide as described herein is encoded by a nucleic acid sequence comprising SEQ ID NO: 15, or a sequence that is at least 70%, at least 75%, at least 80%, at least 85%, at least 90%, at least 90%, at least 91%, at least 92%, at least 93%, at least 94%, at least 95%, at least 96%, at least 97%, at least 98%, or at least 99% identical to SEQ ID NO: 15 that maintains the same function or a codon-optimized version of SEQ ID NO: 15. In some embodiments of any of the aspects, the cofactor for the repressible protease of first AND-gate CAR polypeptide as described herein is encoded by a nucleic acid sequence comprising SEQ ID NO: 15, or a sequence that is at least 95% identical to SEQ ID NO: 15 that maintains the same function.

[0528] In some embodiments of any of the aspects, the first AND-gate CAR polypeptide further comprises at least one protease cleavage site. As a non-limiting example, the first AND-gate CAR polypeptide can comprise 1, 2, 3, 4, 5, or more protease cleavage sites, in between or within any domain(s) as described herein. In one embodiment, the first AND-gate CAR polypeptide comprises 2 protease cleavage sites. In some embodiments of any of the aspects, the repressible protease and the at least one protease cleavage site are located in the same contiguous polypeptide. In some embodiments of any of the aspects, the repressible protease and the at least one protease cleavage site are located adjacent to each other in the same contiguous polypeptide. In some embodiments of any of the aspects, a first protease cleavage site is located 5′ or N-terminal of the repressible protease. In some embodiments of any of the aspects, a second protease cleavage site is located 3′ or C-terminal of the repressible protease. In some embodiments of any of the aspects, the protease cleavage site of the first AND-gate CAR polypeptide comprises an NS5A/5B cut site (SEQ ID NO: 12, 45) and/or an NS4A/5B cut site (SEQ ID NO: 17, 50), or any other protease cleavage site as described herein. In some embodiments of any of the aspects, the first AND-gate CAR polypeptide comprises an NS5A/5B cut site (SEQ ID NO: 12, 45)N-terminal of the repressible, and an NS4A/5B cut site (SEQ ID NO: 17, 50)C-terminal of the repressible protease. In some embodiments of any of the aspects, the repressible protease and the at least one protease cleavage site are not located adjacent to each other in the same contiguous polypeptide.

[0529] In some embodiments of any of the aspects, the protease cleavage site of the first AND-gate CAR polypeptide as described herein comprises SEQ ID NOs: 45 or 50, or an amino acid sequence that is at least 70%, at least 75%, at least 80%, at least 85%, at least 90%, at least 90%, at least 91%, at least 92%, at least 93%, at least 94%, at least 95%, at least 96%, at least 97%, at least 98%, or at least 99% identical to the sequence of one of SEQ ID NOs: 45 or 50 that maintains the same functions as one of SEQ ID NOs: 45 or 50. In some embodiments of any of the aspects, the protease cleavage site of the first AND-gate CAR polypeptide as described herein comprises SEQ ID NOs: 45 or 50, or an amino acid sequence that is at least 95% identical to the sequence of one of SEQ ID NOs: 45 or 50 that maintains the same function.

[0530] In some embodiments of any of the aspects, the protease cleavage site of the first AND-gate CAR polypeptide as described herein is encoded by a nucleic acid sequence comprising SEQ ID NOs: 12 or 17, or a sequence that is at least 70%, at least 75%, at least 80%, at least 85%, at least 90%, at least 90%, at least 91%, at least 92%, at least 93%, at least 94%, at least 95%, at least 96%, at least 97%, at least 98%, or at least 99% identical to one of SEQ ID NOs: 12 or 17 that maintains the same function or a codon-optimized version of one of SEQ ID NO: 12 or 17. In some embodiments of any of the aspects, the protease cleavage site of the first AND-gate CAR polypeptide as described herein is encoded by a nucleic acid sequence comprising SEQ ID NOs: 12 or 17, or a sequence that is at least 95% identical to one of SEQ ID NOs: 12 or 17 that maintains the same function.

[0531] In some embodiments of any of the aspects, the at least one protease cleavage site (e.g., of the first AND-gate CAR polypeptide) is located between the transmembrane domain and the intracellular signaling domain. In some embodiments of any of the aspects, the at least one protease cleavage site (e.g., of the first AND-gate CAR polypeptide) is located: (a) between the transmembrane domain and the repressible protease; or (b) between the repressible protease and the intracellular signaling domain. In some embodiments of any of the aspects, the at least one protease cleavage site (e.g., of the first AND-gate CAR polypeptide) is located: (a) between the transmembrane domain and the repressible protease. In some embodiments of any of the aspects, the at least one protease cleavage site (e.g., of the first AND-gate CAR polypeptide) is located: (b) between the repressible protease and the intracellular signaling domain. In some embodiments of any of the aspects, the at least one protease cleavage site (e.g., of the first AND-gate CAR polypeptide) is located: (a) between the transmembrane domain and the repressible protease; and (b) between the repressible protease and the intracellular signaling domain.

[0532] In some embodiments of any of the aspects, the first AND-gate CAR polypeptide is cleaved when a protease inhibitor is not bound to the repressible protease. In some embodiments of any of the aspects, the protease cleavage site is located or engineered such that, when the first AND-gate CAR polypeptide cleaves itself in the absence of a protease inhibitor, the resulting amino acid at the N-terminus of the newly cleaved polypeptide(s) causes the polypeptide(s) to degrade at a faster rate and have a shorter half-life compared to other cleaved polypeptides, according to the N-end rule as described further herein. In one embodiment, the N-terminal amino acid of the cleaved polypeptide (e.g., the first AND-gate CAR polypeptide) is histidine. In some embodiments of any of the aspects, the amino acid immediately C-terminal of the cleavage site is a histidine.

[0533] In some embodiments of any of the aspects, the first AND-gate CAR polypeptide is in combination with a protease inhibitor bound to the repressible protease. In some embodiments of any of the aspects, the first AND-gate CAR polypeptide is bound to a protease inhibitor bound to the repressible protease. In some embodiments of any of the aspects, the first AND-gate CAR polypeptide is bound specifically to a protease inhibitor bound to the repressible protease. Non-limiting examples of protease inhibitors (e.g., for NS3) include grazoprevir (GZV), danoprevir, simeprevir, asunaprevir, ciluprevir, boceprevir, sovaprevir, paritaprevir, ombitasvir, paritaprevir, ritonavir, dasabuvir, and telaprevir; further examples are described herein. In some embodiments of any of the aspects, the first AND-gate CAR polypeptide is not cleaved (i.e., does not cleave itself) when the protease inhibitor is bound to the repressible protease.

[0534] In some embodiments of any of the aspects, the first AND-gate CAR polypeptide comprises from the N-terminus to the C-terminus: (a) an extracellular binding domain; (b) a transmembrane domain; (c) a first protease cleavage site; (d) a repressible protease; (e) a second protease cleavage site; and (f) a single intracellular signaling domain.

[0535] In some embodiments of any of the aspects, the extracellular binding domain of the first AND-gate CAR polypeptide is an antibody, an antigen-binding fragment thereof, a F(ab) fragment, a F(ab′) fragment, a single chain variable fragment (scFv), or a single-domain antibody (sdAb). In some embodiments of any of the aspects, the extracellular binding domain of the first AND-gate CAR polypeptide comprises a scFv. In some embodiments of any of the aspects, the extracellular binding domain of the first AND-gate CAR polypeptide binds to a tumor antigen, as described further herein. In some embodiments of any of the aspects, the first AND-gate CAR polypeptide comprises a leading peptide located N-terminal to the extracellular binding domain. In some embodiments of any of the aspects, the leading peptide is CD8alpha leading peptide or another leading peptide as described herein.

[0536] In some embodiments of any of the aspects, the transmembrane domain is located between the extracellular binding domain and the at least one intracellular signaling domain. The transmembrane domain of the first AND-gate CAR polypeptide can be any known transmembrane domain. In one embodiment, the transmembrane domain of the first AND-gate CAR polypeptide comprises the transmembrane domain of CD28. In some embodiments of any of the aspects, the first AND-gate CAR polypeptide comprises a spacer domain located between the extracellular binding domain and the transmembrane domain. In some embodiments of any of the aspects, the spacer domain comprises a CD8a hinge domain or another spacer domain as described herein.

[0537] In some embodiments of any of the aspects, the first AND-gate CAR polypeptide comprises 1, 2, 3, 4, 5, or more intracellular signaling domains. In one embodiment, the first AND-gate CAR polypeptide comprises a single intracellular signaling domain. In some embodiments of any of the aspects, the intracellular signaling domain (e.g., of the first AND-gate CAR polypeptide) comprises at least one intracellular signaling domain selected from the group consisting of: TCRC; FcRy; FcRp; CD3zeta; CD3y; CD35; CD3s; CD3C; CD22; CD79a; CD79b; CD66d; CARD11; CD2; CD7; CD27; CD28; CD30; CD40; CD54 (ICAM); CD83; CD134 (OX40); CD137 (4-1BB); CD150 (SLAMF1); CD152 (CTLA4); CD223 (LAG3); CD270 (HVEM); CD273 (PD-L2); CD274 (PD-Ll); CD278 (ICOS); DAP10; LAT; KD2C SLP76; TRIM; ZAP70; and 41BB. In some embodiments of any of the aspects, the intracellular signaling domain of the first AND-gate CAR polypeptide comprises the intracellular signaling domain of CD3zeta. In some embodiments of any of the aspects, the first AND-gate CAR polypeptide further comprises the intracellular signaling domain of 4-1BB, which can be located N-terminal or C-terminal of the CD3zeta domain.

[0538] In some embodiments of any of the aspects, the first AND-gate CAR polypeptide comprises at least one detectable marker as described herein. As a non-limiting example, the at least one detectable marker can be used to detect the expression of the CAR and/or the cleavage or degradation of the first AND-gate CAR polypeptide. In some embodiments of any of the aspects, the first AND-gate CAR polypeptide comprises a detectable marker adjacent to and C terminal of the extracellular binding domain. In some embodiments of any of the aspects, the first AND-gate CAR polypeptide comprises a detectable marker adjacent and N-terminal to the repressible protease. In some embodiments of any of the aspects, the first AND-gate CAR polypeptide comprises a detectable marker adjacent to and C terminal to the repressible protease. As a non-limiting example, the detectable marker(s) can be selected from GFP, V5, HA1, Myc, VSV-G, HSV, FLAG, HIS, mCherry, AU1, and biotin or another detectable marker as described herein (see e.g., Table 2).

[0539] In some embodiments of any of the aspects, the first AND-gate CAR polypeptide comprises SEQ ID NO: 38 or an amino acid sequence that is at least 70%, at least 75%, at least 80%, at least 85%, at least 90%, at least 90%, at least 91%, at least 92%, at least 93%, at least 94%, at least 95%, at least 96%, at least 97%, at least 98%, or at least 99% identical to the sequence of SEQ ID NO: 38 that maintains the same functions as SEQ ID NO: 38 (e.g., target cell binding, CD3zeta signaling, etc.). In some embodiments of any of the aspects, the first AND-gate CAR polypeptide comprises SEQ ID NO: 38 or an amino acid sequence that is at least 95% identical to the sequence of SEQ ID NO: 38 that maintains the same function.

[0540] In some embodiments of any of the aspects, the first AND-gate CAR polypeptide is encoded by a nucleic acid sequence comprising SEQ ID NO: 5 or a sequence that is at least 70%, at least 75%, at least 80%, at least 85%, at least 90%, at least 90%, at least 91%, at least 92%, at least 93%, at least 94%, at least 95%, at least 96%, at least 97%, at least 98%, or at least 99% identical to SEQ ID NO: 5 that maintains the same function or a codon-optimized version of SEQ ID NO: 5. In some embodiments of any of the aspects, the first AND-gate CAR polypeptide is encoded by a nucleic acid sequence comprising SEQ ID NO: 5 or a sequence that is at least 95% identical to SEQ ID NO: 5 that maintains the same function.

[0541] Table 2 shows the locations of specific domains in exemplary AND-Gate CAR sequences. The nucleic acid numbers are shown first, followed by the amino acid residues.

TABLE 2
AND-Gate CAR Sequences

| Element (SEQ ID NOs) | ANDgate-NS3 (SEQ ID NO: 5, 38) | ANDgate-DD (SEQ ID NO: 6, 39) |
|---|---|---|
| CD8a leading peptide (7, 40) | 1-63, 1-20 | 1-63, 1-20 |
| H3B1 scFv (8, 41) | 64-891, 21-296 | |
| V5 tag (9, 42) | 892-933, 297-310 | |
| h#11B7-T18 heavy chain (22, 55) | | 64-402, 21-133 |
| GS linker (23, 56) | | 403-447, 134-148 |
| h#11B7-T18 light chain (24, 57) | | 448-774, 149-257 |
| Myc tag (35, 58) | | 775-804, 258-267 |
| CD8 hinge (10, 43) | 946-1080, 315-359 | 817-951, 272-316 |
| CD28 transmembrane (11, 44) | 1081-1161, 360-386 | 952-1032, 317-343 |
| NS5A/5B cut site (CC) (12, 45) | 1162-1191, 387-396 | |
| N-end rule (13, 46) | 1180-1203, 393-400 | |
| AU1 (14, 47) | 1213-1230, 404-409 | |
| NS4A (15, 48) | 1246-1484, 415-427 | |
| NS3 (16, 49) | 1297-1863, 432-620 | |
| NS4A/4B cut site (CS) (17, 50) | 1915-1956, 638-651 | |
| HA1 (18, 51) | 1957-1983, 652-660 | |
| CD28 ICD (19, 52) | | 1033-1155, 344-384 |
| 41BB ICD (20, 53) | | |
| CD3z ICD (21, 54) | 1984-2319, 661-772 | |
| DHFR (V19A) (26, 59) | | 1159-1632, 386-543 |

[0542] In one aspect described herein is a second polypeptide of an AND-gate CAR system, comprising: (a) an extracellular binding domain; (b) a transmembrane domain; (c) at least one intracellular signaling domain; and (d) a degron domain. In some embodiments of any of the aspects, the extracellular binding domain (e.g., of the second polypeptide of an AND-gate CAR system) is N-terminal to the transmembrane domain, and the transmembrane domain to N-terminal to the intracellular domains (e.g., degron domain and at least one intracellular signaling domain). In some embodiments of any of the aspects, the at least one intracellular signaling domain (e.g., of the second polypeptide of an AND-gate CAR system) is N-terminal to the degron domain. In some embodiments of any of the aspects, the degron domain (e.g., of the second polypeptide of an AND-gate CAR system) is N-terminal to the at least one intracellular signaling domain. In some embodiments of any of the aspects, the degron domain (e.g., of the second polypeptide of an AND-gate CAR system) is N-terminal to at least one intracellular signaling domain and C-terminal to at least one intracellular signaling domain.

[0543] In some embodiments of any of the aspects, the second AND-gate CAR polypeptide comprises 1, 2, 3, 4, 5, or more degron domain(s). In one embodiment, the second AND-gate CAR polypeptide comprises one degron domain. In embodiments comprising multiple degron domains, the multiple degron domains can be different individual degron domains or multiple copies of the same degron domain, or a combination of the foregoing.

[0544] In some embodiments of any of the aspects, the degron domain (e.g., of the second AND-gate CAR polypeptide) comprises a dihydrofolate reductase (DHFR) degron (DD; e.g., SEQ ID NOs: 26, 59) or another degron domain as described further herein. In some embodiments of any of the aspects, the degron domain (e.g., of the second AND-gate CAR polypeptide) is located C terminal to the intracellular signaling domain. In some embodiments of any of the aspects, the degron domain (e.g., of the second AND-gate CAR polypeptide) is located between the transmembrane domain and the intracellular signaling domain.

[0545] In some embodiments of any of the aspects, the degron domain of the second AND-gate CAR polypeptide as described herein comprises SEQ ID NO: 59 or an amino acid sequence that is at least 70%, at least 75%, at least 80%, at least 85%, at least 90%, at least 90%, at least 91%, at least 92%, at least 93%, at least 94%, at least 95%, at least 96%, at least 97%, at least 98%, or at least 99% identical to the sequence of SEQ ID NO: 59 that maintains the same functions as SEQ ID NO: 59 (e.g., degradation, binding to TMP). In some embodiments of any of the aspects, the degron domain of the second AND-gate CAR polypeptide as described herein comprises SEQ ID NO: 59 or an amino acid sequence that is at least 95% identical to the sequence of SEQ ID NO: 59 that maintains the same functions as SEQ ID NO: 59 (e.g., degradation, binding to TMP).

[0546] In some embodiments of any of the aspects, the degron domain of the second AND-gate CAR polypeptide as described herein is encoded by a nucleic acid sequence comprising SEQ ID NO: 26 or a sequence that is at least 70%, at least 75%, at least 80%, at least 85%, at least 90%, at least 90%, at least 91%, at least 92%, at least 93%, at least 94%, at least 95%, at least 96%, at least 97%, at least 98%, or at least 99% identical to SEQ ID NO: 26 that maintains the same function or a codon-optimized version of SEQ ID NO: 26. In some embodiments of any of the aspects, the degron domain of the second AND-gate CAR polypeptide as described herein is encoded by a nucleic acid sequence comprising SEQ ID NO: 26 or a sequence that is at least 95% identical to SEQ ID NO: 26 that maintains the same function.

[0547] In some embodiments of any of the aspects, the second AND-gate CAR polypeptide is in combination with a degron stabilizer bound to the degron domain. In some embodiments of any of the aspects, the second AND-gate CAR polypeptide is bound to a degron stabilizer bound to the degron domain. In some embodiments of any of the aspects, the second AND-gate CAR polypeptide is bound specifically to a degron stabilizer bound to the degron domain. The degron stabilizer can be selected from any known in the art. As a non-limiting example, the degron stabilizer is trimethoprim (TMP; e.g., PubChem CID: 5578). In some embodiments of any of the aspects, the second AND-gate CAR polypeptide is not degraded when the degron stabilizer is bound to the degron domain.

[0548] In some embodiments of any of the aspects, the second AND-gate CAR polypeptide is in combination with a degron destabilizer bound to the degron domain. In some embodiments of any of the aspects, the second AND-gate CAR polypeptide is bound to a degron destabilizer bound to the degron domain. In some embodiments of any of the aspects, the second AND-gate CAR polypeptide is bound specifically to a degron destabilizer bound to the degron domain. The degron destabilizer can be selected from any known in the art. As a non-limiting example, the degron is a ligand-induced degradation (LID) domain and the degron destabilizer is Shield-1 or an analog thereof. In some embodiments of any of the aspects, the second AND-gate CAR polypeptide is degraded when the degron destabilizer is bound to the degron domain.

[0549] In some embodiments of any of the aspects, the second AND-gate CAR polypeptide comprises from the N-terminus to the C-terminus: (a) an extracellular binding domain; (b) a transmembrane domain; (c) an intracellular signaling domain; and (d) a degron domain.

[0550] In some embodiments of any of the aspects, the extracellular binding domain of the second AND-gate CAR polypeptide is an antibody, an antigen-binding fragment thereof, a F(ab) fragment, a F(ab′) fragment, a single chain variable fragment (scFv), or a single-domain antibody (sdAb). In some embodiments of any of the aspects, the extracellular binding domain of the second AND-gate CAR polypeptide comprises a scFv. In some embodiments of any of the aspects, the extracellular binding domain of the second AND-gate CAR polypeptide binds to a tumor antigen, as described further herein. In some embodiments of any of the aspects, the second AND-gate CAR polypeptide comprises a leading peptide located N-terminal to the extracellular binding domain. In some embodiments of any of the aspects, the leading peptide is CD8alpha leading peptide or another leading peptide as described herein.

[0551] In some embodiments of any of the aspects, the transmembrane domain is located between the extracellular binding domain and the at least one intracellular signaling domain. The transmembrane domain of the second AND-gate CAR polypeptide can be any known transmembrane domain. In some embodiments of any of the aspects, the transmembrane domain of the second AND-gate CAR polypeptide comprises the transmembrane domain of CD28. In some embodiments of any of the aspects, the second AND-gate CAR polypeptide comprises a spacer domain located between the extracellular binding domain and the transmembrane domain. In some embodiments of any of the aspects, the spacer domain comprises a CD8a hinge domain or another spacer domain as described herein.

[0552] In some embodiments of any of the aspects, the second AND-gate CAR polypeptide comprises 1, 2, 3, 4, 5, or more intracellular signaling domains. In embodiments comprising multiple intracellular signaling domains, the multiple repressible proteases can be different individual intracellular signaling domains or multiple copies of the same intracellular signaling domain, or a combination of the foregoing. In one embodiment, the second AND-gate CAR polypeptide comprises a single intracellular signaling domain. In some embodiments of any of the aspects, the intracellular signaling domain (e.g., of the second AND-gate CAR polypeptide) comprises an intracellular signaling domain selected from the group consisting of: TCRC; FcRy; FcRp; CD3zeta; CD3y; CD35; CD3s; CD3C; CD22; CD79a; CD79b; CD66d; CARD11; CD2; CD7; CD27; CD28; CD30; CD40; CD54 (ICAM); CD83; CD134 (OX40); CD137 (4-1BB); CD150 (SLAMF1); CD152 (CTLA4); CD223 (LAG3); CD270 (HVEM); CD273 (PD-L2); CD274 (PD-Ll); CD278 (ICOS); DAP10; LAT; KD2C SLP76; TRIM; ZAP70; and 41BB. In some embodiments of any of the aspects, the intracellular signaling domain of the second AND-gate CAR polypeptide comprises the intracellular signaling domain of CD28. In some embodiments of any of the aspects, the second AND-gate CAR polypeptide further comprises the intracellular signaling domain of 4-1BB.

[0553] In some embodiments of any of the aspects, the second AND-gate CAR polypeptide comprises at least one detectable marker as described herein. As a non-limiting example, the at least one detectable marker can be used to detect the expression of the CAR and/or the cleavage or degradation of the second AND-gate CAR polypeptide. In some embodiments of any of the aspects, the second AND-gate CAR polypeptide comprises a detectable marker adjacent to and C terminal of the extracellular binding domain. As a non-limiting example, the detectable marker(s) can be selected from GFP, V5, HA1, Myc, VSV-G, HSV, FLAG, HIS, mCherry, AU1, and biotin or another detectable marker as described herein (see e.g., Table 2).

[0554] In some embodiments of any of the aspects, the second AND-gate CAR polypeptide comprises SEQ ID NO: 39 or an amino acid sequence that is at least 70%, at least 75%, at least 80%, at least 85%, at least 90%, at least 90%, at least 91%, at least 92%, at least 93%, at least 94%, at least 95%, at least 96%, at least 97%, at least 98%, or at least 99% identical to the sequence of SEQ ID NO: 39 that maintains the same functions as SEQ ID NO: 39 (e.g., target cell binding, CD28 signaling, etc.). In some embodiments of any of the aspects, the second AND-gate CAR polypeptide comprises SEQ ID NO: 39 or an amino acid sequence that is at least 95% identical to the sequence of SEQ ID NO: 39 that maintains the same function.

[0555] In some embodiments of any of the aspects, the second AND-gate CAR polypeptide is encoded by a nucleic acid sequence comprising SEQ ID NO: 6 or a sequence that is at least 70%, at least 75%, at least 80%, at least 85%, at least 90%, at least 90%, at least 91%, at least 92%, at least 93%, at least 94%, at least 95%, at least 96%, at least 97%, at least 98%, or at least 99% identical to SEQ ID NO: 6 that maintains the same function or a codon-optimized version of SEQ ID NO: 6. In some embodiments of any of the aspects, the second AND-gate CAR polypeptide is encoded by a nucleic acid sequence comprising SEQ ID NO: 6 or a sequence that is at least 95% identical to SEQ ID NO: 6 that maintains the same function.

[0556] In one aspect, described herein is an AND-gate CAR system comprising the first and second AND-gate CAR polypeptides as described herein. Accordingly, the AND-gate CAR system comprises: (a) a first polypeptide comprising (e.g., from N-terminus to C-terminus): (i) an extracellular binding domain; (ii) a transmembrane domain; (iii) a repressible protease; and (iv) an intracellular signaling domain; and (b) a second polypeptide comprising (e.g., from N-terminus to C-terminus): (i) an extracellular binding domain; (ii) a transmembrane domain; (iii) an intracellular signaling domain; and (iv) a degron domain.

[0557] In some embodiments of any of the aspects, the AND-gate CAR system is functional (i.e., results in intracellular signaling) only in the presence of the protease inhibitor and the degron stabilizer. As a non-limiting example, the AND-gate CAR system is not functional in the following situations: (1) absence of both the protease inhibitor and the degron stabilizer; (2) absence of the protease inhibitor and presence of the degron stabilizer; and (3) presence of the protease inhibitor and absence of the degron stabilizer.

[0558] In some embodiments of any of the aspects, one polypeptide of the AND-gate CAR system comprises a repressible protease, and the other polypeptide of the AND-gate CAR system comprises a degron domain. In some embodiments of any of the aspects, one polypeptide of the AND-gate CAR system comprises an intracellular signaling domain, and the other polypeptide of the AND-gate CAR system comprises an intracellular signaling domain that is a co-stimulatory domain. The AND-gate CAR system can comprise any combination and assortment of repressible protease, degron domain, signaling domain, and co-stimulatory domain between the two polypeptides (see e.g., Table 6 for non-limiting examples). In some embodiments of any of the aspects, the first and second polypeptides of the AND-gate CAR system each comprise a repressible protease and/or a degron domain. In some embodiments of any of the aspects, one polypeptide of the AND-gate CAR system comprises the intracellular signaling domain of CD28, and the other polypeptide of the AND-gate CAR system comprises the intracellular signaling domain of CD3zeta.

[0559] In some embodiments of any of the aspects, the first polypeptide of the AND-gate CAR system comprises a signaling domain. In some embodiments of any of the aspects, the signaling domain (e.g., of the first polypeptide of the AND-gate CAR system) comprises the intracellular signaling domain of CD3zeta. In some embodiments of any of the aspects, the second polypeptide of the AND-gate CAR system comprises at least one co-stimulatory signaling domain. In some embodiments of any of the aspects, the co-stimulatory signaling domain (e.g., of the second polypeptide of the AND-gate CAR system) comprises the intracellular signaling domain of CD28. In some embodiments of any of the aspects, the co-stimulatory signaling domain (e.g., of the second polypeptide of the AND-gate CAR system) comprises the intracellular signaling domain of 4-1BB.

TABLE 6
Exemplary combinations of domains in the first (1^{st}) and
second (2^{nd}) polypeptides of the AND-gate CAR system.

| | Pro. | Deg. | CD3z | CD28 | 41BB |
|---|---|---|---|---|---|
| 1st | x | | x | | |
| 2nd | | x | | x | |
| 1st | x | | x | | x |
| 2nd | | x | | x | |
| 1st | x | | x | | |
| 2nd | | x | | x | x |
| 1st | x | | x | | x |
| 2nd | | x | | x | x |
| 1st | | x | x | | |
| 2nd | x | | | x | |
| 1st | | x | x | | x |
| 2nd | x | | | x | |
| 1st | | x | x | | |
| 2nd | x | | | x | x |
| 1st | | x | x | | x |
| 2nd | x | | | x | x |
| 1st | x | | x | | |
| 2nd | x | | | x | |
| 1st | x | | x | | x |
| 2nd | x | | | x | |
| 1st | x | | x | | |
| 2nd | x | | | x | x |
| 1st | x | | x | | x |
| 2nd | x | | | x | x |
| 1st | | x | x | | |
| 2nd | | x | | x | |
| 1st | | x | x | | x |
| 2nd | | x | | x | |
| 1st | | x | x | | |
| 2nd | | x | | x | x |
| 1st | | x | x | | x |
| 2nd | | x | | x | x |
| 1st | x | x | x | | |
| 2nd | x | | | x | |
| 1st | x | x | x | | x |
| 2nd | x | | | x | |
| 1st | x | x | x | | |
| 2nd | x | | | x | x |
| 1st | x | x | x | | x |
| 2nd | x | | | x | x |
| 1st | x | | x | | |
| 2nd | x | x | | x | |
| 1st | x | | x | | x |
| 2nd | x | x | | x | |
| 1st | x | | x | | |
| 2nd | x | x | | x | x |
| 1st | x | | x | | x |
| 2nd | x | x | | x | x |
| 1st | x | x | x | | |
| 2nd | | x | | x | |
| 1st | x | x | x | | x |
| 2nd | | x | | x | |
| 1st | x | x | x | | |
| 2nd | | x | | x | x |
| 1st | x | x | x | | x |
| 2nd | | x | | x | x |
| 1st | x | x | x | | |
| 2nd | x | x | | x | |
| 1st | x | x | x | | x |
| 2nd | x | x | | x | |
| 1st | x | x | x | | |
| 2nd | x | x | | x | x |
| 1st | x | x | x | | x |
| 2nd | x | x | | x | x |
| 1st | x | | | | x |
| 2nd | | x | x | x | |
| 1st | x | | x | x | |
| 2nd | | x | | | x |
| 1st | x | | x | x | x |
| 2nd | | x | | | x |
| 1st | x | | | | x |
| 2nd | | x | x | x | x |
| 1st | | x | | | x |
| 2nd | x | | x | x | |
| 1st | | x | x | x | |
| 2nd | x | | | | x |
| 1st | | x | x | x | x |
| 2nd | x | | | | x |
| 1st | | x | | | x |
| 2nd | x | | x | x | x |
| 1st | x | | | | x |
| 2nd | x | | x | x | |
| 1st | x | | x | x | |
| 2nd | x | | | | x |
| 1st | x | | x | x | x |
| 2nd | x | | | | x |
| 1st | x | | | | x |
| 2nd | x | | x | x | x |
| 1st | | x | | | x |
| 2nd | | x | x | x | |
| 1st | | x | x | x | |
| 2nd | | x | | | x |
| 1st | | x | x | x | x |
| 2nd | | x | | | x |
| 1st | | x | | | x |
| 2nd | | x | x | x | x |
| 1st | x | x | | | x |
| 2nd | x | | x | x | |
| 1st | x | x | x | x | |
| 2nd | x | | | | x |
| 1st | x | x | x | x | x |
| 2nd | x | | | | x |
| 1st | x | x | | | x |
| 2nd | x | | x | x | x |
| 1st | x | | | | x |
| 2nd | x | x | x | x | |
| 1st | x | | x | x | |
| 2nd | x | x | | | x |
| 1st | x | | x | x | x |
| 2nd | x | x | | | x |
| 1st | x | | | | x |
| 2nd | x | x | x | x | x |
| 1st | x | x | | | x |
| 2nd | | x | x | x | |
| 1st | x | x | x | x | |
| 2nd | | x | | | x |
| 1st | x | x | x | x | x |
| 2nd | | x | | | x |
| 1st | x | x | | | x |
| 2nd | | x | x | x | x |
| 1st | x | x | | | x |
| 2nd | x | x | x | x | |
| 1st | x | x | x | x | |
| 2nd | x | x | | | x |
| 1st | x | x | x | x | x |
| 2nd | x | x | | | x |
| 1st | x | x | | | x |
| 2nd | x | x | x | x | x |

“Pro.” indicates the repressible protease, and “deg.” indicates the degron domain. The domains shown in Table 6 are not necessarily shown in sequential order. Each polypeptide in Table 6 further comprises a transmembrane domain and an extracellular binding domain.

[0560] In some embodiments of any of the aspects, the extracellular binding domain of the first AND-gate CAR polypeptide binds to a tumor antigen that is the same as the tumor antigen that binds to the extracellular binding domain of the second AND-gate CAR polypeptide. In some embodiments of any of the aspects, the extracellular binding domain of the first AND-gate CAR polypeptide binds to a tumor antigen that is different than the tumor antigen that binds to the extracellular binding domain of the second AND-gate CAR polypeptide. In some embodiments of any of the aspects, the extracellular binding domain of the first AND-gate CAR polypeptide binds to a tumor antigen that is different than but found in close proximity to (e.g., on the same tumor cell) the tumor antigen that binds to the extracellular binding domain of the second AND-gate CAR polypeptide. In some embodiments of any of the aspects, the AND-gate system is not functional (e.g., result in intracellular signaling) unless both antigens of the first and second AND-gate CAR polypeptides are present in close proximity (e.g., on the same tumor cell).

[0561] In some embodiments of any of the aspects, the first polypeptide and second polypeptide (e.g., of the AND-gate system) in the same contiguous molecule. In some embodiments of any of the aspects, the first polypeptide (e.g., of the AND-gate system) is N-terminal of the second polypeptide. In some embodiments of any of the aspects, the second polypeptide (e.g., of the AND-gate system) is N-terminal of the first polypeptide.

[0562] In some embodiments of any of the aspects, the first polypeptide and second polypeptide (e.g., of the AND-gate system) flank a self-cleaving peptide domain. In some embodiments of any of the aspects, the self-cleaving peptide is T2A, P2A, or another self-cleaving peptide as described herein. The self-cleaving peptide allows the nucleic acids of the first polypeptide and second polypeptide (e.g., of the AND-gate system) to be present in the same vector, but after translation the self-cleaving peptide cleaves the translated polypeptide into two separate polypeptides.

[0563] In several aspects, described herein are drug-repressible (i.e., OFF-switch) CAR systems comprising two polypeptide components. A first polypeptide comprises a repressible protease, and a second polypeptide comprises a peptide domain that specifically binds to the repressible protease, such that in the absence of protease inhibitor specific for the repressible protease the two polypeptides of the OFF-switch CAR system are recruited together by the protease binding to the peptide. One or both of the polypeptides of the OFF-switch CAR system comprises an extracellular binding domain (e.g., specific for a tumor antigen), and one or both of the polypeptides comprise at least one intracellular signaling domain such that when the two polypeptides are brought into close proximity, binding of the cognate antigen to the extracellular binding domain results in intracellular signaling of the OFF-switch CAR system. In the presence of protease inhibitor, the two polypeptides of the OFF-switch CAR system are not brought together, and no intracellular signaling occurs, even in the presence of the cognate antigen. Thus, this drug-repressible system can be turned off in the presence of the protease inhibitor.

[0564] In one aspect described herein is a first polypeptide of an OFF-switch CAR system, comprising: (a) an extracellular binding domain; (b) a transmembrane domain; and (c) a peptide domain. In some embodiments of any of the aspects, the extracellular binding domain (e.g., of the first polypeptide of an OFF-switch CAR system) is N-terminal to the transmembrane domain, and the transmembrane domain to N-terminal to the intracellular domains (e.g., peptide domain and any other intracellular domains if present). In some embodiments of any of the aspects, the first polypeptide of an OFF-switch CAR system further comprises at least one intracellular signaling domain as described further herein. In some embodiments of any of the aspects, the at least one intracellular signaling domain (e.g., of the first polypeptide of an OFF-switch CAR system) is N-terminal to the peptide domain. In some embodiments of any of the aspects, the peptide domain (e.g., of the first polypeptide of an OFF-switch CAR system) is N-terminal to the at least one intracellular signaling domain. In some embodiments of any of the aspects, the peptide domain (e.g., of the first polypeptide of an OFF-switch CAR system) is N-terminal to at least one intracellular signaling domain and C-terminal to at least one intracellular signaling domain.

[0565] In some embodiments of any of the aspects, the peptide domain is specifically bound by a repressible protease. In some embodiments of any of the aspects, the peptide domain is specifically bound by NS3. In some embodiments of any of the aspects, the peptide domain is specifically bound by NS3 genotype 1B (e.g., SEQ ID NO: 75, 99). In some embodiments of any of the aspects, the peptide domain is specifically bound by any repressible protease as described herein. In some embodiments of any of the aspects, the first OFF-switch CAR polypeptide does not comprise any protease cleavage sites for the repressible protease.

[0566] In some embodiments of any of the aspects, the peptide domain of the first OFF-switch CAR polypeptide as described herein is specifically bound by a repressible protease comprising SEQ ID NO: 99, or an amino acid sequence that is at least 70%, at least 75%, at least 80%, at least 85%, at least 90%, at least 90%, at least 91%, at least 92%, at least 93%, at least 94%, at least 95%, at least 96%, at least 97%, at least 98%, or at least 99% identical to the sequence of SEQ ID NO: 99 that maintains the same function. In some embodiments of any of the aspects, the peptide domain of the first OFF-switch CAR polypeptide as described herein is specifically bound by a repressible protease comprising SEQ ID NO: 99, or an amino acid sequence that is at least 95% identical to the sequence of SEQ ID NO: 99 that maintains the same function.

[0567] In some embodiments of any of the aspects, the peptide domain of the first OFF-switch CAR polypeptide as described herein is specifically bound by a repressible protease encoded by a nucleic acid sequence comprising SEQ ID NO: 75, or a sequence that is at least 70%, at least 75%, at least 80%, at least 85%, at least 90%, at least 90%, at least 91%, at least 92%, at least 93%, at least 94%, at least 95%, at least 96%, at least 97%, at least 98%, or at least 99% identical to SEQ ID NO: 75 that maintains the same function or a codon-optimized version of SEQ ID NO: 75. In some embodiments of any of the aspects, the peptide domain of the first OFF-switch CAR polypeptide as described herein is specifically bound by a repressible protease encoded by a nucleic acid sequence comprising SEQ ID NO: 75, or a sequence that is at least 95% identical to SEQ ID NO: 75 that maintains the same function.

[0568] In some embodiments of any of the aspects, the peptide domain comprises any peptide domain as described herein. In some embodiments of any of the aspects, the first polypeptide (e.g., of the OFF-switch CAR system) comprises 1, 2, 3, 4, or at least 5 peptide domains. In some embodiments of any of the aspects, the first OFF-switch CAR polypeptide comprises one peptide domain. In embodiments comprising multiple peptide domains, the multiple peptide domains can be different individual peptide domains or multiple copies of the same peptide domain, or a combination of the foregoing.

[0569] In some embodiments of any of the aspects, the peptide domain of the first OFF-switch CAR polypeptide as described herein comprises SEQ ID NO: 95, or an amino acid sequence that is at least 70%, at least 75%, at least 80%, at least 85%, at least 90%, at least 90%, at least 91%, at least 92%, at least 93%, at least 94%, at least 95%, at least 96%, at least 97%, at least 98%, or at least 99% identical to the sequence of SEQ ID NO: 95 that maintains the same function. In some embodiments of any of the aspects, the peptide domain of the first OFF-switch CAR polypeptide as described herein comprises SEQ ID NO: 95, or an amino acid sequence that is at least 95% identical to the sequence of SEQ ID NO: 95 that maintains the same function.

[0570] In some embodiments of any of the aspects, the peptide domain of the first OFF-switch CAR polypeptide as described herein is encoded by a nucleic acid sequence comprising SEQ ID NO: 71, or a sequence that is at least 70%, at least 75%, at least 80%, at least 85%, at least 90%, at least 90%, at least 91%, at least 92%, at least 93%, at least 94%, at least 95%, at least 96%, at least 97%, at least 98%, or at least 99% identical to SEQ ID NO: 71 that maintains the same function or a codon-optimized version of SEQ ID NO: 71. In some embodiments of any of the aspects, the peptide domain of the first OFF-switch CAR polypeptide as described herein is encoded by a nucleic acid sequence comprising SEQ ID NO: 71, or a sequence that is at least 95% identical to SEQ ID NO: 71 that maintains the same function.

[0571] In some embodiments of any of the aspects, the first polypeptide (e.g., of the OFF-switch CAR system) is referred to as “component a.” In some embodiments of any of the aspects, the component a polypeptide comprises from the N-terminus to the C-terminus: (a) an extracellular binding domain (e.g., SEQ ID NO: 70, 94); (b) a transmembrane domain (e.g., SEQ ID NO: 11, 44); and (c) a peptide domain (e.g., SEQ ID NO: 71, 95). In some embodiments of any of the aspects, the first polypeptide (e.g., component a of the OFF-switch CAR system) does not comprise an intracellular signaling domain.

[0572] In some embodiments of any of the aspects, the component a polypeptide (e.g., of the OFF-switch CAR system) as described herein comprises SEQ ID NOs: 94, 44, and 95, or an amino acid sequence that is at least 70%, at least 75%, at least 80%, at least 85%, at least 90%, at least 90%, at least 91%, at least 92%, at least 93%, at least 94%, at least 95%, at least 96%, at least 97%, at least 98%, or at least 99% identical to a sequence comprising SEQ ID NOs: 94, 44, and 95 that maintains the same functions as SEQ ID NOs: 94, 44, and 95. In some embodiments of any of the aspects, the component a polypeptide (e.g., of the OFF-switch CAR system) as described herein comprises SEQ ID NOs: 94, 44, and 95, or an amino acid sequence that is at least 95% identical to a sequence comprising SEQ ID NOs: 94, 44, and 95 that maintains the same functions as SEQ ID NOs: 94, 44, and 95.

[0573] In some embodiments of any of the aspects, the component a polypeptide (e.g., of the OFF-switch CAR system) as described herein is encoded by a nucleic acid sequence comprising SEQ ID NOs: 70, 11, and 71, or a sequence that is at least 70%, at least 75%, at least 80%, at least 85%, at least 90%, at least 90%, at least 91%, at least 92%, at least 93%, at least 94%, at least 95%, at least 96%, at least 97%, at least 98%, or at least 99% identical to a sequence comprising SEQ ID NOs: 70, 11, and 71 that maintains the same function or a codon-optimized version thereof. In some embodiments of any of the aspects, the component a polypeptide (e.g., of the OFF-switch CAR system) as described herein is encoded by a nucleic acid sequence comprising SEQ ID NOs: 70, 11, and 71, or a sequence that is at least 95% identical to a sequence comprising SEQ ID NOs: 70, 11, and 71 that maintains the same function.

[0574] In some embodiments of any of the aspects, the first polypeptide (e.g., of the OFF-switch CAR system) is referred to as “component b”, “component c” or “component d.” In some embodiments of any of the aspects, the component b, c, or d polypeptide (e.g., of the OFF-switch CAR system) comprises from the N-terminus to the C-terminus: (a) an extracellular binding domain; (b) a transmembrane domain; (c) at least one intracellular signaling domain; and (d) a peptide domain. In some embodiments of any of the aspects, the component b or c polypeptide (e.g., of the OFF-switch CAR system) comprises from the N-terminus to the C-terminus: (a) an extracellular binding domain; (b) a transmembrane domain; (c) a single intracellular signaling domain; and (d) a peptide domain.

[0575] In some embodiments of any of the aspects, the component b polypeptide (e.g., of the OFF-switch CAR system) comprises the intracellular signaling domain of 4-1BB (e.g., SEQ ID NO: 20, 53) as the single intracellular signaling domain. In some embodiments of any of the aspects, the component b polypeptide (e.g., of the OFF-switch CAR system) comprises from the N-terminus to the C-terminus: (a) an extracellular binding domain (e.g., SEQ ID NO: 70, 94); (b) a transmembrane domain (e.g., SEQ ID NO: 11, 44); (c) a 4-1BB intracellular signaling domain (e.g., SEQ ID NO: 20, 53); and (d) a peptide domain (e.g., SEQ ID NO: 71, 95).

[0576] In some embodiments of any of the aspects, the component b polypeptide (e.g., of the OFF-switch CAR system) as described herein comprises SEQ ID NOs: 94, 44, 53, and 95, or an amino acid sequence that is at least 70%, at least 75%, at least 80%, at least 85%, at least 90%, at least 90%, at least 91%, at least 92%, at least 93%, at least 94%, at least 95%, at least 96%, at least 97%, at least 98%, or at least 99% identical to a sequence comprising SEQ ID NOs: 94, 44, 53, and 95 that maintains the same functions as SEQ ID NOs: 94, 44, 53, and 95. In some embodiments of any of the aspects, the component b polypeptide (e.g., of the OFF-switch CAR system) as described herein comprises SEQ ID NOs: 94, 44, 53, and 95, or an amino acid sequence that is at least 95% identical to a sequence comprising SEQ ID NOs: 94, 44, 53, and 95 that maintains the same functions as SEQ ID NOs: 94, 44, 53, and 95.

[0577] In some embodiments of any of the aspects, the component b polypeptide (e.g., of the OFF-switch CAR system) as described herein is encoded by a nucleic acid sequence comprising SEQ ID NOs: 70, 11, 20, and 71, or a sequence that is at least 70%, at least 75%, at least 80%, at least 85%, at least 90%, at least 90%, at least 91%, at least 92%, at least 93%, at least 94%, at least 95%, at least 96%, at least 97%, at least 98%, or at least 99% identical to a sequence comprising SEQ ID NOs: 70, 11, 20, and 71 that maintains the same function or a codon-optimized version thereof. In some embodiments of any of the aspects, the component b polypeptide (e.g., of the OFF-switch CAR system) as described herein is encoded by a nucleic acid sequence comprising SEQ ID NOs: 70, 11, 20, and 71, or a sequence that is at least 95% identical to a sequence comprising SEQ ID NOs: 70, 11, 20, and 71 that maintains the same function.

[0578] In some embodiments of any of the aspects, the component c polypeptide (e.g., of the OFF-switch CAR system) comprises the intracellular signaling domain of CD28 as the single intracellular signaling domain. In some embodiments of any of the aspects, the component c polypeptide (e.g., of the OFF-switch CAR system) comprises from the N-terminus to the C-terminus: (a) an extracellular binding domain; (b) a transmembrane domain; (c) a CD28 intracellular signaling domain; and (d) a peptide domain.

[0579] In some embodiments of any of the aspects, the component c polypeptide (e.g., of the OFF-switch CAR system) comprises SEQ ID NO: 84 or an amino acid sequence that is at least 70%, at least 75%, at least 80%, at least 85%, at least 90%, at least 90%, at least 91%, at least 92%, at least 93%, at least 94%, at least 95%, at least 96%, at least 97%, at least 98%, or at least 99% identical to the sequence of SEQ ID NO: 84 that maintains the same functions as SEQ ID NO: 84 (e.g., target cell binding, peptide domain, etc.). In some embodiments of any of the aspects, the component c polypeptide (e.g., of the OFF-switch CAR system) comprises SEQ ID NO: 84 or an amino acid sequence that is at least 95% identical to the sequence of SEQ ID NO: 84 that maintains the same function.

[0580] In some embodiments of any of the aspects, the component c polypeptide (e.g., of the OFF-switch CAR system) is encoded by a nucleic acid sequence comprising SEQ ID NO: 60 or a sequence that is at least 70%, at least 75%, at least 80%, at least 85%, at least 90%, at least 90%, at least 91%, at least 92%, at least 93%, at least 94%, at least 95%, at least 96%, at least 97%, at least 98%, or at least 99% identical to SEQ ID NO: 60 that maintains the same function or a codon-optimized version of SEQ ID NO: 60. In some embodiments of any of the aspects, the component c polypeptide (e.g., of the OFF-switch CAR system) is encoded by a nucleic acid sequence comprising SEQ ID NO: 60 or a sequence that is at least 95% identical to SEQ ID NO: 60 that maintains the same function.

[0581] In some embodiments of any of the aspects, the component d polypeptide (e.g., of the OFF-switch CAR system) comprises from the N-terminus to the C-terminus: (a) an extracellular binding domain; (b) a transmembrane domain; (c) a first intracellular signaling domain; (d) a second intracellular signaling domain; and (e) a peptide domain. In some embodiments of any of the aspects, the first (or second) intracellular signaling domain of the component d polypeptide (e.g., of the OFF-switch CAR system) comprises the intracellular signaling domain of CD28. In some embodiments of any of the aspects, the second (or first) intracellular signaling domain of the component d polypeptide (e.g., of the OFF-switch CAR system) comprises the intracellular signaling domain of 4-1BB.

[0582] In some embodiments of any of the aspects, the component d polypeptide (e.g., of the OFF-switch CAR system) comprises SEQ ID NO: 85 or an amino acid sequence that is at least 70%, at least 75%, at least 80%, at least 85%, at least 90%, at least 90%, at least 91%, at least 92%, at least 93%, at least 94%, at least 95%, at least 96%, at least 97%, at least 98%, or at least 99% identical to the sequence of SEQ ID NO: 85 that maintains the same functions as SEQ ID NO: 85 (e.g., target cell binding, peptide domain, etc.). In some embodiments of any of the aspects, the component d polypeptide (e.g., of the OFF-switch CAR system) comprises SEQ ID NO: 85 or an amino acid sequence that is at least 95% identical to the sequence of SEQ ID NO: 85 that maintains the same function.

[0583] In some embodiments of any of the aspects, the component d polypeptide (e.g., of the OFF-switch CAR system) is encoded by a nucleic acid sequence comprising SEQ ID NO: 61 or a sequence that is at least 70%, at least 75%, at least 80%, at least 85%, at least 90%, at least 90%, at least 91%, at least 92%, at least 93%, at least 94%, at least 95%, at least 96%, at least 97%, at least 98%, or at least 99% identical to SEQ ID NO: 61 that maintains the same function or a codon-optimized version of SEQ ID NO: 61. In some embodiments of any of the aspects, the component d polypeptide (e.g., of the OFF-switch CAR system) is encoded by a nucleic acid sequence comprising SEQ ID NO: 61 or a sequence that is at least 95% identical to SEQ ID NO: 61 that maintains the same function.

[0584] In some embodiments of any of the aspects, the extracellular binding domain of the first OFF-switch CAR polypeptide is an antibody, an antigen-binding fragment thereof, a F(ab) fragment, a F(ab′) fragment, a single chain variable fragment (scFv), or a single-domain antibody (sdAb). In some embodiments of any of the aspects, the extracellular binding domain of the first OFF-switch CAR polypeptide comprises a scFv. In some embodiments of any of the aspects, the extracellular binding domain of the first OFF-switch CAR polypeptide binds to a tumor antigen, as described further herein. In some embodiments of any of the aspects, the first OFF-switch CAR polypeptide comprises a leading peptide located N-terminal to the extracellular binding domain. In some embodiments of any of the aspects, the leading peptide is CD8alpha leading peptide or another leading peptide as described herein.

[0585] In some embodiments of any of the aspects, the transmembrane domain is located between the extracellular binding domain and the at least one intracellular signaling domain. The transmembrane domain of the first OFF-switch CAR polypeptide can be any known transmembrane domain. In one embodiment, the transmembrane domain of the first OFF-switch CAR polypeptide comprises the transmembrane domain of CD28. In some embodiments of any of the aspects, the first OFF-switch CAR polypeptide comprises a spacer domain located between the extracellular binding domain and the transmembrane domain. In some embodiments of any of the aspects, the spacer domain comprises a CD8a hinge domain or another spacer domain as described herein.

[0586] In some embodiments of any of the aspects, the first OFF-switch CAR polypeptide comprises 0, 1, 2, 3, 4, 5, or more intracellular signaling domains. In embodiments comprising multiple intracellular signaling domains, the multiple repressible proteases can be different individual intracellular signaling domains or multiple copies of the same intracellular signaling domain, or a combination of the foregoing. In some embodiments of any of the aspects, the intracellular signaling domain (e.g., of the first OFF-switch CAR polypeptide), if it is present, comprises at least one intracellular signaling domain selected from the group consisting of: TCRC; FcRy; FcRp; CD3zeta; CD3y; CD35; CD3s; CD3C; CD22; CD79a; CD79b; CD66d; CARD11; CD2; CD7; CD27; CD28; CD30; CD40; CD54 (ICAM); CD83; CD134 (OX40); CD137 (4-1BB); CD150 (SLAMF1); CD152 (CTLA4); CD223 (LAG3); CD270 (HVEM); CD273 (PD-L2); CD274 (PD-Ll); CD278 (ICOS); DAP10; LAT; KD2C SLP76; TRIM; ZAP70; and 41BB. In some embodiments of any of the aspects, the first OFF-switch CAR polypeptide comprises the intracellular signaling domain of CD28 and/or 4-1BB.

[0587] In some embodiments of any of the aspects, the first OFF-switch CAR polypeptide comprises at least one detectable marker as described herein. As a non-limiting example, the at least one detectable marker can be used to detect the expression of the first OFF-switch CAR polypeptide. In some embodiments of any of the aspects, the first OFF-switch CAR polypeptide comprises a detectable marker adjacent to and C terminal of the extracellular binding domain. As a non-limiting example, the detectable marker(s) can be selected from GFP, V5, HA1, Myc, VSV-G, HSV, FLAG, HIS, mCherry, AU1, and biotin or another detectable marker as described herein (see e.g., Table 3).

[0588] In one aspect described herein is a second polypeptide of an OFF-switch CAR system, comprising: (a) an extracellular domain; (b) a transmembrane domain; (c) a repressible protease; and (d) at least one intracellular signaling domain. In some embodiments of any of the aspects, the extracellular domain (e.g., of the second polypeptide of an OFF-switch CAR system) is N-terminal to the transmembrane domain, and the transmembrane domain to N-terminal to the intracellular domains (e.g., repressible protease and at least one intracellular signaling domain). In some embodiments of any of the aspects, the at least one intracellular signaling domain (e.g., of the second polypeptide of an OFF-switch CAR system) is N-terminal to the repressible protease. In some embodiments of any of the aspects, the repressible protease (e.g., of the second polypeptide of an OFF-switch CAR system) is N-terminal to the at least one intracellular signaling domain. In some embodiments of any of the aspects, the repressible protease (e.g., of the second polypeptide of an OFF-switch CAR system) is N-terminal to at least one intracellular signaling domain and C-terminal to at least one intracellular signaling domain.

[0589] In one aspect described herein is a second polypeptide of an OFF-switch CAR system, comprising: (a) a repressible protease and (b) at least one intracellular signaling domain. In some embodiments of any of the aspects, the second polypeptide of an OFF-switch CAR system does not comprise an extracellular domain and/or a transmembrane; accordingly, the second polypeptide of an OFF-switch CAR system can be an intracellular protein, as opposed to a transmembrane protein.

[0590] In some embodiments of any of the aspects, the second OFF-switch CAR polypeptide comprises 1, 2, 3, 4, 5, or more repressible protease(s). In one embodiment, the second OFF-switch CAR polypeptide comprises one repressible protease. In embodiments comprising multiple repressible proteases, the multiple repressible proteases can be different individual repressible proteases or multiple copies of the same repressible protease, or a combination of the foregoing. In some embodiments of any of the aspects, the repressible protease (e.g., of the second OFF-switch CAR polypeptide) is hepatitis C virus (HCV) nonstructural protein 3 (NS3). In one embodiment, the repressible protease of the second OFF-switch CAR polypeptide comprises NS3 genotype 1B (e.g., SEQ ID NO: 75, 99).

[0591] In some embodiments of any of the aspects, the repressible protease of the second OFF-switch CAR polypeptide as described herein comprises SEQ ID NO: 99, or an amino acid sequence that is at least 70%, at least 75%, at least 80%, at least 85%, at least 90%, at least 90%, at least 91%, at least 92%, at least 93%, at least 94%, at least 95%, at least 96%, at least 97%, at least 98%, or at least 99% identical to the sequence of SEQ ID NO: 99 that maintains the same function. In some embodiments of any of the aspects, the repressible protease of the second OFF-switch CAR polypeptide as described herein comprises SEQ ID NO: 99, or an amino acid sequence that is at least 95% identical to the sequence of SEQ ID NO: 99 that maintains the same function.

[0592] In some embodiments of any of the aspects, the repressible protease of the second OFF-switch CAR polypeptide as described herein is encoded by a nucleic acid sequence comprising SEQ ID NO: 75, or a sequence that is at least 70%, at least 75%, at least 80%, at least 85%, at least 90%, at least 90%, at least 91%, at least 92%, at least 93%, at least 94%, at least 95%, at least 96%, at least 97%, at least 98%, or at least 99% identical to SEQ ID NO: 75 that maintains the same function or a codon-optimized version of SEQ ID NO: 75. In some embodiments of any of the aspects, the repressible protease of the second OFF-switch CAR polypeptide as described herein is encoded by a nucleic acid sequence comprising SEQ ID NO: 75, or a sequence that is at least 95% identical to SEQ ID NO: 75 that maintains the same function.

[0593] In some embodiments of any of the aspects, the repressible protease of the second OFF-switch CAR polypeptide is catalytically inactive (i.e., dead). For NS3 genotype 1B, the catalytic triad comprises His-57, Asp-81, and Ser-139. Accordingly, a catalytically inactive NS3 protease can comprise a nonsynonymous mutation at any one of His-57, Asp-8 1, and Ser-139, or another inactivating mutation as described herein. In some embodiments of any of the aspects, the N33 protease (e.g., of the second OFF-switch CAR polypeptide) comprises an S139A mutation. In regard to a repressible protease, “catalytically inactive” refers to the inability to cleave at a protease cleavage site. In some embodiments of any of the aspects, the catalytically inactive repressible protease retains the ability to specifically bind to the peptide domain of the first OFF-switch CAR polypeptide, but the catalytically inactive repressible protease does not cleave the peptide domain. In some embodiments of any of the aspects, the second OFF-switch CAR polypeptide does not comprise any protease cleavage sites. In some embodiments of any of the aspects, the repressible protease (e.g., of the second OFF-switch CAR polypeptide) can be any repressible protease as described further herein, e.g., that binds to the peptide domain of the first OFF-switch CAR polypeptide.

[0594] In some embodiments of any of the aspects, the repressible protease (e.g., of the second OFF-switch CAR polypeptide) is located: (a) between the transmembrane domain and the at least one intracellular signaling domain; (b) between the first intracellular signaling domain and the second intracellular signaling domain; or (c) at the C terminus of the polypeptide. In some embodiments of any of the aspects, the repressible protease (e.g., of the second OFF-switch CAR polypeptide) is located: (a) between the transmembrane domain and the at least one intracellular signaling domain. In some embodiments of any of the aspects, the repressible protease (e.g., of the second OFF-switch CAR polypeptide) is located: (b) between the first intracellular signaling domain and the second intracellular signaling domain. In some embodiments of any of the aspects, the repressible protease (e.g., of the second OFF-switch CAR polypeptide) is located: (c) at the C terminus of the polypeptide.

[0595] In some embodiments of any of the aspects, the repressible protease (e.g., of the second OFF-switch CAR polypeptide) is located: (a) between the transmembrane domain and the at least one intracellular signaling domain; and (b) between the first intracellular signaling domain and the second intracellular signaling domain. In some embodiments of any of the aspects, the repressible protease (e.g., of the second OFF-switch CAR polypeptide) is located: (a) between the transmembrane domain and the at least one intracellular signaling domain; and (c) at the C terminus of the polypeptide. In some embodiments of any of the aspects, the repressible protease (e.g., of the second OFF-switch CAR polypeptide) is located: (b) between the first intracellular signaling domain and the second intracellular signaling domain; and (c) at the C terminus of the polypeptide. In some embodiments of any of the aspects, the repressible protease (e.g., of the second OFF-switch CAR polypeptide) is located: (a) between the transmembrane domain and the at least one intracellular signaling domain; (b) between the first intracellular signaling domain and the second intracellular signaling domain; and (c) at the C terminus of the polypeptide.

[0596] In some embodiments of any of the aspects, the second OFF-switch CAR polypeptide is in combination with a protease inhibitor bound to the repressible protease. In some embodiments of any of the aspects, the second OFF-switch CAR polypeptide is bound to a protease inhibitor bound to the repressible protease. In some embodiments of any of the aspects, the second OFF-switch CAR polypeptide is bound specifically to a protease inhibitor bound to the repressible protease. Non-limiting examples of protease inhibitors (e.g., for NS3) include grazoprevir (GZV), danoprevir, simeprevir, asunaprevir, ciluprevir, boceprevir, sovaprevir, paritaprevir, ombitasvir, paritaprevir, ritonavir, dasabuvir, and telaprevir; further examples are described herein. In some embodiments of any of the aspects, the second OFF-switch CAR polypeptide does not bind to the first OFF-switch CAR polypeptide when the protease inhibitor is bound to the repressible protease of the second OFF-switch CAR polypeptide.

[0597] In some embodiments of any of the aspects, the second OFF-switch CAR polypeptide further comprises a cofactor for the repressible protease. In some embodiments of any of the aspects, the cofactor (e.g., for NS3) is an HSV NS4A domain, as described further herein. In one embodiment, the second OFF-switch CAR polypeptide comprises genotype 1B NS4A (e.g., SEQ ID NO: 74, 98). In some embodiments of any of the aspects, the HSV NS4A domain is adjacent and N-terminal to the repressible protease (e.g., NS3).

[0598] In some embodiments of any of the aspects, the cofactor for the repressible protease of the second OFF-switch CAR polypeptide as described herein comprises SEQ ID NO: 98, or an amino acid sequence that is at least 70%, at least 75%, at least 80%, at least 85%, at least 90%, at least 90%, at least 91%, at least 92%, at least 93%, at least 94%, at least 95%, at least 96%, at least 97%, at least 98%, or at least 99% identical to the sequence of SEQ ID NO: 98 that maintains the same function. In some embodiments of any of the aspects, the cofactor for the repressible protease of the second OFF-switch CAR polypeptide as described herein comprises SEQ ID NO: 98, or an amino acid sequence that is at least 95% identical to the sequence of SEQ ID NO: 98 that maintains the same function.

[0599] In some embodiments of any of the aspects, the cofactor for the repressible protease of the second OFF-switch CAR polypeptide as described herein is encoded by a nucleic acid sequence comprising SEQ ID NO: 74, or a sequence that is at least 70%, at least 75%, at least 80%, at least 85%, at least 90%, at least 90%, at least 91%, at least 92%, at least 93%, at least 94%, at least 95%, at least 96%, at least 97%, at least 98%, or at least 99% identical to SEQ ID NO: 74 that maintains the same function or a codon-optimized version of SEQ ID NO: 74. In some embodiments of any of the aspects, the cofactor for the repressible protease of the second OFF-switch CAR polypeptide as described herein is encoded by a nucleic acid sequence comprising SEQ ID NO: 74, or a sequence that is at least 95% identical to SEQ ID NO: 74 that maintains the same function.

[0600] In some embodiments of any of the aspects, the second polypeptide (e.g., of the OFF-switch CAR system) is referred to as “component i.” In some embodiments of any of the aspects, the component i polypeptide (e.g., of the OFF-switch CAR system) comprises from the N-terminus to the C-terminus: (a) an extracellular domain; (b) a transmembrane domain; (c) at least one intracellular signaling domain; (d) a repressible protease; and (e) at least one intracellular signaling domain. In some embodiments of any of the aspects, the component i polypeptide (e.g., of the OFF-switch CAR system) comprises from the N-terminus to the C-terminus: (a) an extracellular domain; (b) a transmembrane domain; (c) a first intracellular signaling domain; (d) a repressible protease; and (e) a second intracellular signaling domain. In some embodiments of any of the aspects, the first intracellular signalling domain of component i (e.g., of the second OFF-switch CAR polypeptide) comprises the intracellular signaling domain of 4-1BB. In some embodiments of any of the aspects, the second intracellular signalling domain of component i (e.g., of the second OFF-switch CAR polypeptide) comprises the intracellular signaling domain of CD3zeta.

[0601] In some embodiments of any of the aspects, the component i polypeptide (e.g., of the OFF-switch CAR system) comprises SEQ ID NO: 86 or an amino acid sequence that is at least 70%, at least 75%, at least 80%, at least 85%, at least 90%, at least 90%, at least 91%, at least 92%, at least 93%, at least 94%, at least 95%, at least 96%, at least 97%, at least 98%, or at least 99% identical to the sequence of SEQ ID NO: 86 that maintains the same functions as SEQ ID NO: 86 (e.g., CD3zeta signaling, etc.). In some embodiments of any of the aspects, the component i polypeptide (e.g., of the OFF-switch CAR system) comprises SEQ ID NO: 86 or an amino acid sequence that is at least 95% identical to the sequence of SEQ ID NO: 86 that maintains the same function.

[0602] In some embodiments of any of the aspects, the component i polypeptide (e.g., of the OFF-switch CAR system) is encoded by a nucleic acid sequence comprising SEQ ID NO: 62 or a sequence that is at least 70%, at least 75%, at least 80%, at least 85%, at least 90%, at least 90%, at least 91%, at least 92%, at least 93%, at least 94%, at least 95%, at least 96%, at least 97%, at least 98%, or at least 99% identical to SEQ ID NO: 62 that maintains the same function or a codon-optimized version of SEQ ID NO: 62. In some embodiments of any of the aspects, the component i polypeptide (e.g., of the OFF-switch CAR system) is encoded by a nucleic acid sequence comprising SEQ ID NO: 62 or a sequence that is at least 95% identical to SEQ ID NO: 62 that maintains the same function.

[0603] In some embodiments of any of the aspects, the second polypeptide (e.g., of the OFF-switch CAR system) is referred to as “component ii” or “component iv.” In some embodiments of any of the aspects, the component ii or component iv polypeptide (e.g., of the OFF-switch CAR system) comprises from the N-terminus to the C-terminus: (a) an extracellular domain; (b) a transmembrane domain; (c) at least one intracellular signaling domain; and (d) a repressible protease. In some embodiments of any of the aspects, the component ii polypeptide (e.g., of the OFF-switch CAR system) comprises from the N-terminus to the C-terminus: (a) an extracellular domain; (b) a transmembrane domain; (c) a first intracellular signaling domain; (d) a second intracellular signaling domain; and (e) a repressible protease. In some embodiments of any of the aspects, the first intracellular signalling domain of component ii (e.g., of the second OFF-switch CAR polypeptide) comprises the intracellular signaling domain of 4-1BB. In some embodiments of any of the aspects, the second intracellular signalling domain of component ii (e.g., of the second OFF-switch CAR polypeptide) comprises the intracellular signaling domain of CD3zeta.

[0604] In some embodiments of any of the aspects, the component ii polypeptide (e.g., of the OFF-switch CAR system) comprises SEQ ID NO: 87 or an amino acid sequence that is at least 70%, at least 75%, at least 80%, at least 85%, at least 90%, at least 90%, at least 91%, at least 92%, at least 93%, at least 94%, at least 95%, at least 96%, at least 97%, at least 98%, or at least 99% identical to the sequence of SEQ ID NO: 87 that maintains the same functions as SEQ ID NO: 87 (e.g., CD3zeta signaling, etc.). In some embodiments of any of the aspects, the component ii polypeptide (e.g., of the OFF-switch CAR system) comprises SEQ ID NO: 87 or an amino acid sequence that is at least 95% identical to the sequence of SEQ ID NO: 87 that maintains the same function.

[0605] In some embodiments of any of the aspects, the component ii polypeptide (e.g., of the OFF-switch CAR system) is encoded by a nucleic acid sequence comprising SEQ ID NO: 63 or a sequence that is at least 70%, at least 75%, at least 80%, at least 85%, at least 90%, at least 90%, at least 91%, at least 92%, at least 93%, at least 94%, at least 95%, at least 96%, at least 97%, at least 98%, or at least 99% identical to SEQ ID NO: 63 that maintains the same function or a codon-optimized version of SEQ ID NO: 63. In some embodiments of any of the aspects, the component ii polypeptide (e.g., of the OFF-switch CAR system) is encoded by a nucleic acid sequence comprising SEQ ID NO: 63 or a sequence that is at least 95% identical to SEQ ID NO: 63 that maintains the same function.

[0606] In some embodiments of any of the aspects, the second polypeptide (e.g., of the OFF-switch CAR system) is referred to as “component iii.” In some embodiments of any of the aspects, the component iii polypeptide (e.g., of the OFF-switch CAR system) comprises from the N-terminus to the C-terminus: (a) an extracellular domain; (b) a transmembrane domain; (c) a repressible protease; and (d) at least one intracellular signaling domain. In some embodiments of any of the aspects, the component iii polypeptide (e.g., of the OFF-switch CAR system) comprises from the N-terminus to the C-terminus: (a) an extracellular domain; (b) a transmembrane domain; (c) a repressible protease; and (d) a single intracellular signaling domain. In some embodiments of any of the aspects, the single intracellular signalling domain of component iii (e.g., of the second OFF-switch CAR polypeptide) comprises the intracellular signaling domain of CD3zeta.

[0607] In some embodiments of any of the aspects, the component iii polypeptide (e.g., of the OFF-switch CAR system) comprises SEQ ID NO: 88 or an amino acid sequence that is at least 70%, at least 75%, at least 80%, at least 85%, at least 90%, at least 90%, at least 91%, at least 92%, at least 93%, at least 94%, at least 95%, at least 96%, at least 97%, at least 98%, or at least 99% identical to the sequence of SEQ ID NO: 88 that maintains the same functions as SEQ ID NO: 88 (e.g., CD3zeta signaling, etc.). In some embodiments of any of the aspects, the component iii polypeptide (e.g., of the OFF-switch CAR system) comprises SEQ ID NO: 88 or an amino acid sequence that is at least 95% identical to the sequence of SEQ ID NO: 88 that maintains the same function.

[0608] In some embodiments of any of the aspects, the component iii polypeptide (e.g., of the OFF-switch CAR system) is encoded by a nucleic acid sequence comprising SEQ ID NO: 64 or a sequence that is at least 70%, at least 75%, at least 80%, at least 85%, at least 90%, at least 90%, at least 91%, at least 92%, at least 93%, at least 94%, at least 95%, at least 96%, at least 97%, at least 98%, or at least 99% identical to SEQ ID NO: 64 that maintains the same function or a codon-optimized version of SEQ ID NO: 64. In some embodiments of any of the aspects, the component iii polypeptide (e.g., of the OFF-switch CAR system) is encoded by a nucleic acid sequence comprising SEQ ID NO: 64 or a sequence that is at least 95% identical to SEQ ID NO: 64 that maintains the same function.

[0609] In some embodiments of any of the aspects, the component iv polypeptide (e.g., of the OFF-switch CAR system) comprises from the N-terminus to the C-terminus: (a) an extracellular domain; (b) a transmembrane domain; (c) a single intracellular signaling domain; and (d) a repressible protease. In some embodiments of any of the aspects, the single intracellular signalling domain of component iv (e.g., of the second OFF-switch CAR polypeptide) comprises the intracellular signaling domain of CD3zeta.

[0610] In some embodiments of any of the aspects, the component iv polypeptide (e.g., of the OFF-switch CAR system) comprises SEQ ID NO: 89 or an amino acid sequence that is at least 70%, at least 75%, at least 80%, at least 85%, at least 90%, at least 90%, at least 91%, at least 92%, at least 93%, at least 94%, at least 95%, at least 96%, at least 97%, at least 98%, or at least 99% identical to the sequence of SEQ ID NO: 89 that maintains the same functions as SEQ ID NO: 89 (e.g., CD3zeta signaling, etc.). In some embodiments of any of the aspects, the component iv polypeptide (e.g., of the OFF-switch CAR system) comprises SEQ ID NO: 89 or an amino acid sequence that is at least 95% identical to the sequence of SEQ ID NO: 89 that maintains the same function.

[0611] In some embodiments of any of the aspects, the component iv polypeptide (e.g., of the OFF-switch CAR system) is encoded by a nucleic acid sequence comprising SEQ ID NO: 65 or a sequence that is at least 70%, at least 75%, at least 80%, at least 85%, at least 90%, at least 90%, at least 91%, at least 92%, at least 93%, at least 94%, at least 95%, at least 96%, at least 97%, at least 98%, or at least 99% identical to SEQ ID NO: 65 that maintains the same function or a codon-optimized version of SEQ ID NO: 65. In some embodiments of any of the aspects, the component iv polypeptide (e.g., of the OFF-switch CAR system) is encoded by a nucleic acid sequence comprising SEQ ID NO: 65 or a sequence that is at least 95% identical to SEQ ID NO: 65 that maintains the same function or a codon-optimized version of SEQ ID NO: 65.

[0612] In some embodiments of any of the aspects, the extracellular domain (e.g., of the second OFF-switch CAR system polypeptide) comprises the extracellular domain of DAP10. In some embodiments of any of the aspects, the extracellular domain (e.g., of the second OFF-switch CAR system polypeptide) is another extracellular domain as described herein. In some embodiments of any of the aspects, the second OFF-switch CAR system polypeptide does not comprise an extracellular binding domain.

[0613] In some embodiments of any of the aspects, the transmembrane domain is located between the extracellular domain and the at least one intracellular signaling domain. The transmembrane domain of the second OFF-switch CAR polypeptide can be any known transmembrane domain. In one embodiment, the transmembrane domain of the second OFF-switch CAR polypeptide comprises the transmembrane domain of CD8.

[0614] In some embodiments of any of the aspects, the second OFF-switch CAR polypeptide comprises 1, 2, 3, 4, 5, or more intracellular signaling domains. In some embodiments of any of the aspects, the intracellular signaling domain (e.g., of the second OFF-switch CAR polypeptide) comprises at least one intracellular signaling domain selected from the group consisting of: TCRC; FcRy; FcRp; CD3zeta; CD3y; CD35; CD3s; CD3C; CD22; CD79a; CD79b; CD66d; CARD11; CD2; CD7; CD27; CD28; CD30; CD40; CD54 (ICAM); CD83; CD134 (OX40); CD137 (4-1BB); CD150 (SLAMF1); CD152 (CTLA4); CD223 (LAG3); CD270 (HVEM); CD273 (PD-L2); CD274 (PD-Ll); CD278 (ICOS); DAP10; LAT; KD2C SLP76; TRIM; ZAP70; and 41BB. In some embodiments of any of the aspects, the second OFF-switch CAR polypeptide comprises the intracellular signaling domain of 4-1BB and/or CD3zeta.

[0615] In some embodiments of any of the aspects, the second OFF-switch CAR polypeptide further comprises at least one detectable marker as described further herein. In some embodiments of any of the aspects, the detectable marker (e.g., of the second OFF-switch CAR polypeptide) is located at the C-terminal end of the polypeptide. In some embodiments of any of the aspects, the detectable marker (e.g., of the second OFF-switch CAR polypeptide) is selected from GFP, V5, HA1, Myc, VSV-G, HSV, FLAG, HIS, AU1, mCherry, and biotin.

[0616] Tables 3 and 4 shows the locations of specific domains in exemplary two-component OFF-Switch CAR sequences. Table 3 shows the first component, and Table 4 shows the second component. The nucleic acid numbers are shown first, followed by the amino acid residues.

TABLE 3
OFF-Switch CAR Sequences, First Component

| Element (SEQ ID NOs) | Component c (SEQ ID NO: 60, 84) | Component d (SEQ ID NO: 61, 85) |
|---|---|---|
| CD8a leading peptide (7, 40) | 1-63, 1-20 | 1-63, 1-20 |
| CD19 scFv (70, 94) | 64-789, 21-262 | 64-789, 21-262 |
| V5 tag (9, 42) | 790-831, 263-276 | 790-831, 263-276 |
| CD8 hinge (10, 43) | 844-978, 281-325 | 844-978, 281-325 |
| CD28 transmembrane (11, 44) | 979-1059, 326-352 | 979-1059, 326-352 |
| CD28 ICD (19, 52) | 1060-1182, 353-393 | 1060-1182, 353-393 |
| 41BB ICD (20, 53) | | 1183-1308, 394-435 |
| CP5-46-5D5E (71, 95) | 1228-1326, 409-441 | 1354-1452, 451-483 |

TABLE 4
OFF-Switch CAR Sequences, Second Component

| | Component i (SEQ | Component ii (SEQ | Component iii (SEQ | Component iv (SEQ |
|---|---|---|---|---|
| Element (SEQ ID NOs) | ID NO: 62, 86) | ID NO: 63, 87) | ID NO: 64, 88) | ID NO: 65, 89) |
| DAP10 ectodomain | 1-144, 1-47 | 1-144, 1-47 | 1-144, 1-47 | 1-144, 1-47 |
| (72, 96) | | | | |
| CD8 transmembrane | 145-207, 48-68 | 145-207, 48-68 | 145-207, 48-68 | 145-207, 48-68 |
| (73, 97) | | | | |
| 41BB ICD (20, 53) | 208-333, 69-110 | 208-333, 69-110 | | |
| NS4A (74, 98) | 334-369, 111-122 | 670-705, 223-234 | 208-243, 69-80 | 544-579, 181-192 |
| NS3 (75, 99) | 382-918, 127-305 | 718-1254, 239-417 | 256-792, 85-263 | 592-1128, 197-375 |
| CD3z ICD (21, 54) | 919-1254, 306-417 | 334-669, 111-222 | 793-1128, 264-375 | 208-543, 69-180 |
| mCherry (76, 100) | 1258-1968, 419-654 | 1258-1968, 419-654 | 1132-1842, 377-612 | 1132-1842, 377-612 |

[0617] In one aspect, described herein is an OFF-switch CAR system comprising the first and second OFF-switch polypeptides as described herein. Accordingly, the OFF-switch CAR system comprises: (a) a first polypeptide comprising: (i) an extracellular binding domain; (ii) a transmembrane domain; and (iii) a peptide domain; and (b) a second polypeptide comprising: (i) an extracellular domain; (ii) a transmembrane domain; (iii) a repressible protease; and (iv) at least one intracellular signaling domain. In some embodiments of any of the aspects, the second polypeptide (e.g., of the OFF-switch CAR system) specifically binds to the first polypeptide (e.g., of the OFF-switch CAR system); see e.g., Tables 7 and 8. In some embodiments of any of the aspects, the second polypeptide (e.g., of the OFF-switch CAR system) specifically binds to the first polypeptide (e.g., of the OFF-switch CAR system) in the absence of a protease inhibitor. In some embodiments of any of the aspects, the OFF-switch CAR system is active (e.g., results in intracellular signaling when the extracellular binding domain binds its specific antigen) in the absence of the protease inhibitor.

[0618] In some embodiments of any of the aspects, the OFF-switch CAR system is in combination with a protease inhibitor bound to the repressible protease of the second polypeptide. In some embodiments of any of the aspects, the second OFF-switch CAR polypeptide is bound to a protease inhibitor bound to the repressible protease. In some embodiments of any of the aspects, the second OFF-switch CAR polypeptide is bound specifically to a protease inhibitor bound to the repressible protease. In some embodiments of any of the aspects, the protease inhibitor is selected from grazoprevir (GZV), danoprevir, simeprevir, asunaprevir, ciluprevir, boceprevir, sovaprevir, paritaprevir, ombitasvir, paritaprevir, ritonavir, dasabuvir, telaprevir, or another protease inhibitor as described herein.

[0619] In some embodiments of any of the aspects, the second polypeptide (e.g., of the OFF-switch CAR system) does not specifically bind the first polypeptide (e.g., of the OFF-switch CAR system) in the presence of the protease inhibitor. In some embodiments of any of the aspects, the OFF-switch CAR system is inactive (e.g., does not result in intracellular signaling) in the presence of the protease inhibitor.

[0620] In some embodiments of any of the aspects, one polypeptide of the OFF-switch CAR system comprises a peptide domain, and the other polypeptide of the OFF-switch CAR system comprises a repressible protease that binds to the peptide domain. In some embodiments of any of the aspects, one polypeptide of the OFF-switch CAR system comprises an intracellular signaling domain, and the other polypeptide of the OFF-switch CAR system comprises an intracellular signaling domain that is a co-stimulatory domain. In some embodiments of any of the aspects, one polypeptide of the OFF-switch CAR system comprises an extracellular binding domain, and the other polypeptide of the OFF-switch CAR system comprises an extracellular domain (e.g., extracellular domain of DAP10) but does not comprise an extracellular binding domain. The OFF-switch CAR system can comprise any combination and assortment of peptide domain, repressible protease, extracellular domain, signaling domain, and co-stimulatory domain between the two polypeptides (see e.g., Table 10 for non-limiting examples).

[0621] In some embodiments of any of the aspects, the first polypeptide (e.g., of the OFF-switch CAR system) comprises a co-stimulatory signaling domain. In some embodiments of any of the aspects, the co-stimulatory signaling domain of the first polypeptide (e.g., of the OFF-switch CAR system) comprises the co-stimulatory signaling domain of CD28. In some embodiments of any of the aspects, the co-stimulatory signaling domain of the first polypeptide (e.g., of the OFF-switch CAR system) comprises the co-stimulatory signaling domain of 4-1BB.

[0622] In some embodiments of any of the aspects, the second polypeptide (e.g., of the OFF-switch CAR system) comprises a signaling domain. In some embodiments of any of the aspects, the co-stimulatory signaling domain of the second polypeptide (e.g., of the OFF-switch CAR system) comprises the signaling domain of CD3zeta. In some embodiments of any of the aspects, the second polypeptide (e.g., of the OFF-switch CAR system) further comprises a co-stimulatory signaling domain. In some embodiments of any of the aspects, the co-stimulatory signaling domain of the second polypeptide (e.g., of the OFF-switch CAR system) comprises the co-stimulatory signaling domain of 4-1BB.

[0623] In some embodiments of any of the aspects, both polypeptides of the OFF-switch CAR system comprise an extracellular binding domain. In some embodiments of any of the aspects, the extracellular binding domain of the first OFF-switch CAR polypeptide binds to a tumor antigen that is the same as the tumor antigen that binds to the extracellular binding domain of the second OFF-switch CAR polypeptide. In some embodiments of any of the aspects, the extracellular binding domain of the first OFF-switch CAR polypeptide binds to a tumor antigen that is different than the tumor antigen that binds to the extracellular binding domain of the second OFF-switch CAR polypeptide. In some embodiments of any of the aspects, the extracellular binding domain of the first OFF-switch CAR polypeptide binds to a tumor antigen that is different than but found in close proximity to (e.g., on the same tumor cell) the tumor antigen that binds to the extracellular binding domain of the second OFF-switch CAR polypeptide. In some embodiments of any of the aspects, the OFF-switch CAR system is not functional (e.g., result in intracellular signaling) unless both antigens of the first and second OFF-switch CAR polypeptides are present in close proximity (e.g., on the same tumor cell).

TABLE 10
Exemplary combinations of domains in the first (1^{st}) and
second (2^{nd}) polypeptides of the OFF-switch CAR system.

| | EBD | Pep. | Pro. | CD3z | CD28 | 41BB |
|---|---|---|---|---|---|---|
| 1st | x | x | | | x | |
| 2nd | | | x | x | | |
| 1st | x | x | | | x | x |
| 2nd | | | x | x | | |
| 1st | x | x | | | x | |
| 2nd | | | x | x | | x |
| 1st | x | x | | | x | x |
| 2nd | | | x | x | | x |
| 1st | x | | x | | x | |
| 2nd | | x | | x | | |
| 1st | x | | x | | x | x |
| 2nd | | x | | x | | |
| 1st | x | | x | | x | |
| 2nd | | x | | x | | x |
| 1st | x | | x | | x | x |
| 2nd | | x | | x | | x |
| 1st | | x | | | x | |
| 2nd | x | | x | x | | |
| 1st | | x | | | x | x |
| 2nd | x | | x | x | | |
| 1st | | x | | | x | |
| 2nd | x | | x | x | | x |
| 1st | | x | | | x | x |
| 2nd | x | | x | x | | x |
| 1st | | | x | | x | |
| 2nd | x | x | | x | | |
| 1st | | | x | | x | x |
| 2nd | x | x | | x | | |
| 1st | | | x | | x | |
| 2nd | x | x | | x | | x |
| 1st | | | x | | x | x |
| 2nd | x | x | | x | | x |
| 1st | x | x | | | x | |
| 2nd | x | | x | x | | |
| 1st | x | x | | | x | x |
| 2nd | x | | x | x | | |
| 1st | x | x | | | x | |
| 2nd | x | | x | x | | x |
| 1st | x | x | | | x | x |
| 2nd | x | | x | x | | x |
| 1st | x | | x | | x | |
| 2nd | x | x | | x | | |
| 1st | x | | x | | x | x |
| 2nd | x | x | | x | | |
| 1st | x | | x | | x | |
| 2nd | x | x | | x | | x |
| 1st | x | | x | | x | x |
| 2nd | x | x | | x | | x |
| 1st | x | x | | | | x |
| 2nd | | | x | x | x | |
| 1st | x | x | | x | x | |
| 2nd | | | x | | | x |
| 1st | x | x | | | | x |
| 2nd | | | x | x | x | x |
| 1st | x | x | | x | x | x |
| 2nd | | | x | | | x |
| 1st | x | | x | | | x |
| 2nd | | x | | x | x | |
| 1st | x | | x | x | x | |
| 2nd | | x | | | | x |
| 1st | x | | x | | | x |
| 2nd | | x | | x | x | x |
| 1st | x | | x | x | x | x |
| 2nd | | x | | | | x |
| 1st | | x | | | | x |
| 2nd | x | | x | x | x | |
| 1st | | x | | x | x | |
| 2nd | x | | x | | | x |
| 1st | | x | | | | x |
| 2nd | x | | x | x | x | x |
| 1st | | x | | x | x | x |
| 2nd | x | | x | | | x |
| 1st | | | x | | | x |
| 2nd | x | x | | x | x | |
| 1st | | | x | x | x | |
| 2nd | x | x | | | | x |
| 1st | | | x | | | x |
| 2nd | x | x | | x | x | x |
| 1st | | | x | x | x | x |
| 2nd | x | x | | | | x |
| 1st | x | x | | | | x |
| 2nd | x | | x | x | x | |
| 1st | x | x | | x | x | |
| 2nd | x | | x | | | x |
| 1st | x | x | | | | x |
| 2nd | x | | x | x | x | x |
| 1st | x | x | | x | x | x |
| 2nd | x | | x | | | x |
| 1st | x | | x | | | x |
| 2nd | x | x | | x | x | |
| 1st | x | | x | x | x | |
| 2nd | x | x | | | | x |
| 1st | x | | x | | | x |
| 2nd | x | x | | x | x | x |
| 1st | x | | x | x | x | x |
| 2nd | x | x | | | | x |
| 1st | x | x | | | | |
| 2nd | | | x | x | | |
| 1st | x | x | | | | |
| 2nd | | | x | x | x | |
| 1st | x | x | | | | |
| 2nd | | | x | x | | x |
| 1st | x | x | | | | |
| 2nd | | | x | x | x | x |
| 1st | x | | x | | | |
| 2nd | | x | | x | | |
| 1st | x | | x | | | |
| 2nd | | x | | x | x | |
| 1st | x | | x | | | |
| 2nd | | x | | x | | x |
| 1st | x | | x | | | |
| 2nd | | x | | x | x | x |

“EBD” indicates extracellular binding domain; where an EBD is not indicated, then an extracellular domain (e.g., DAP10 extracellular domain) is present.
“Pep” indicates the peptide domain.
“Pro.” indicates the repressible protease. The domains shown in Table 10 are not necessarily shown in sequential order. Each polypeptide in Table 10 further comprises a transmembrane domain.

[0624] In some embodiments of any of the aspects, the first polypeptide and second polypeptide (e.g., of the OFF-switch CAR system) are physically linked to one another; in other words, the first polypeptide and second polypeptide (e.g., of the OFF-switch CAR system) are in the same contiguous molecule. In some embodiments of any of the aspects, the first polypeptide (e.g., of the OFF-switch CAR system) is N-terminal of the second polypeptide. In some embodiments of any of the aspects, the second polypeptide (e.g., of the OFF-switch CAR system) is N-terminal of the first polypeptide.

[0625] In some embodiments of any of the aspects, the first polypeptide and second polypeptide (e.g., of the OFF-switch CAR system) flank a self-cleaving peptide domain. In some embodiments of any of the aspects, the self-cleaving peptide is T2A, P2A, or another self-cleaving peptide as described herein. The self-cleaving peptide allows the nucleic acids of the first polypeptide and second polypeptide (e.g., of the OFF-switch CAR system) to be present in the same vector, but after translation the self-cleaving peptide cleaves the translated polypeptide into two separate polypeptides.

[0626] In some embodiments of any of the aspects, the OFF-switch CAR system polypeptide comprises SEQ ID NOs: 114, 115, 116, 117, 118, 119, 120, or 121 or an amino acid sequence that is at least 70%, at least 75%, at least 80%, at least 85%, at least 90%, at least 90%, at least 91%, at least 92%, at least 93%, at least 94%, at least 95%, at least 96%, at least 97%, at least 98%, or at least 99% identical to the sequence of one of SEQ ID NOs: 114-121 that maintains the same functions as one of SEQ ID NOs: 114-121 (e.g., target cell binding, CD3zeta signaling, etc.). In some embodiments of any of the aspects, the OFF-switch CAR system polypeptide comprises SEQ ID NOs: 114, 115, 116, 117, 118, 119, 120, or 121 or an amino acid sequence that is at least 95% identical to the sequence of one of SEQ ID NOs: 114-121 that maintains the same function.

[0627] In some embodiments of any of the aspects, the OFF-switch CAR system polypeptide is encoded by a nucleic acid sequence comprising SEQ ID NOs: 103, 107, 108, 109, 110, 111, 112, 113 or a sequence that is at least 70%, at least 75%, at least 80%, at least 85%, at least 90%, at least 90%, at least 91%, at least 92%, at least 93%, at least 94%, at least 95%, at least 96%, at least 97%, at least 98%, or at least 99% identical to one of SEQ ID NOs: 106-121 that maintains the same function or a codon-optimized version of one of SEQ ID NOs: 106-121. In some embodiments of any of the aspects, the OFF-switch CAR system polypeptide is encoded by a nucleic acid sequence comprising SEQ ID NOs: 103, 107, 108, 109, 110, 111, 112, 113 or a sequence that is at least 95% identical to one of SEQ ID NOs: 106-121 that maintains the same function or a codon-optimized version of one of SEQ ID NOs: 106-121.

[0628] Tables 7 and 8 shows the locations of specific domains in exemplary OFF-Switch CAR system sequences. The nucleic acid numbers are shown first, followed by the amino acid residues.

TABLE 7
OFF-Switch CAR systems (component c constructs)

| | OFF-CAR_c + i (SEQ | OFF-CAR_c + ii (SEQ | OFF-CAR_c + iii (SEQ | OFF-CAR_c + iv (SEQ |
|---|---|---|---|---|
| Element (SEQ ID NOs) | ID NO: 106, 114) | ID NO: 107, 115) | ID NO: 108, 116) | ID NO: 109, 117) |
| CD8a leading peptide | 1-63, 1-20 | 1-63, 1-20 | 1-63, 1-20 | 1-63, 1-20 |
| (7, 40) | | | | |
| CD19 scFv (70, 94) | 64-789, 21-262 | 64-789, 21-262 | 64-789, 21-262 | 64-789, 21-262 |
| V5 tag (9, 42) | 790-831, 263-276 | 790-831, 263-276 | 790-831, 263-276 | 790-831, 263-276 |
| CD8 hinge (10, 43) | 844-978, 281-325 | 844-978, 281-325 | 844-978, 281-325 | 844-978, 281-325 |
| CD28 transmembrane | 979-1059, 326-352 | 979-1059, 326-352 | 979-1059, 326-352 | 979-1059, 326-352 |
| (11, 44) | | | | |
| CD28 ICD (19, 52) | 1060-1182, 353-393 | 1060-1182, 353-393 | 1060-1182, 353-393 | 1060-1182, 353-393 |
| 41BB ICD (20, 53) | | | | |
| CP5-46-5D5E (71, 95) | 1228-1326, 409-441 | 1228-1326, 409-441 | 1228-1326, 409-441 | 1228-1326, 409-441 |
| P2A (122, 123) | 1327-1392, 442-463 | 1327-1392, 442-463 | 1327-1392, 442-463 | 1327-1392, 442-463 |
| DAP10 ectodomain | 1393-1536, 464-511 | 1393-1536, 464-511 | 1393-1536, 464-511 | 1393-1536, 464-511 |
| (72, 96) | | | | |
| CD8 transmembrane | 1537-1599, 512-532 | 1537-1599, 512-532 | 1537-1599, 512-532 | 1537-1599, 512-532 |
| (73, 97, 124) | | | | |
| 41BB ICD (20, 53) | 1600-1725, 533-574 | 1600-1725, 533-574 | | |
| NS4A (74, 98) | 1726-1761, 575-586 | 2062-2097, 687-698 | 1600-1635, 533-544 | 1936-1971, 645-656 |
| NS3 (75, 99) | 1774-2310, 591-769 | 2100-2646, 703-881 | 1648-2184, 549-727 | 1984-2520, 661-839 |
| CD3z ICD (21, 54) | 2311-2646, 770-881 | 1726-2061, 576-686 | 2185-2520, 728-839 | 1600-1935, 533-644 |
| mCherry (76, 100) | 2650-3360, 883-1118 | 2650-3360, 883-1118 | 2524-3234, 841-1076 | 2524-3234, 841-1076 |

TABLE 8
OFF-Switch CAR systems (component d constructs)

| | OFF-CAR_d + i (SEQ | OFF-CAR_d + ii (SEQ | OFF-CAR d + iii (SEQ | OFF-CAR_d + iv (SEQ |
|---|---|---|---|---|
| Element (SEQ ID NOs) | ID NO: 110, 118) | ID NO: 111, 119) | ID NO: 112, 120) | ID NO: 113, 121) |
| CD8a leading peptide (7, 40) | 1-63, 1-20 | 1-63, 1-20 | 1-63, 1-20 | 1-63, 1-20 |
| CD19 scFv (70, 94) | 64-789, 21-262 | 64-789, 21-262 | 64-789, 21-262 | 64-789, 21-262 |
| V5 tag (9, 42) | 790-831, 263-276 | 790-831, 263-276 | 790-831, 263-276 | 790-831, 263-276 |
| CDS hinge (10, 43) | 844-978, 281-325 | 844-978, 281-325 | 844-978, 281-325 | 844-978, 281-325 |
| CD28 transmembrane (11, 44) | 979-1059, 326-352 | 979-1059, 326-352 | 979-1059, 326-352 | 979-1059, 326-352 |
| CD28 ICD (19, 52) | 1060-1182, 353-393 | 1060-1182, 353-393 | 1060-1182, 353-393 | 1060-1182, 353-393 |
| 41BB ICD (20, 53) | 1183-1308, 394-435 | 1183-1308, 394-435 | 1183-1308, 394-435 | 1183-1308, 394-435 |
| CP5-46-5D5E (71, 95) | 1354-1452, 451-483 | 1354-1452, 451-483 | 1354-1452, 451-483 | 1354-1452, 451-483 |
| P2A (122, 123) | 1453-1518, 484-505 | 1453-1518, 484-505 | 1453-1518, 484-505 | 1453-1518, 484-505 |
| DAP10 ectodomain (72, 96) | 1519-1662, 506-553 | 1519-1662, 506-553 | 1519-1662, 506-553 | 1519-1662, 506-553 |
| CD8 transmembrane (73, 97, | 1663-1725, 554-574 | 1663-1725, 554-574 | 1663-1725, 554-574 | 1663-1725, 554-574 |
| 124) | | | | |
| 41BB ICD (20, 53) | 1726-1851, 575-616 | 1726-1851, 575-616 | | |
| NS4A (74, 98) | 1852-1887, 617-628 | 2188-2223, 729-740 | 1726-1761, 575-586 | 2062-2097, 687-698 |
| NS3 (75, 99) | 1900-2436, 633-811 | 2236-2772, 745-923 | 1774-2310, 591-769 | 2110-2646, 703-881 |
| CD3z ICD (21, 54) | 2437-2772, 812-923 | 1852-2187, 617-728 | 2311-2646, 770-881 | 1726-2061, 575-686 |
| mCherry (76, 100) | 2776-3486, 925-1160 | 2776-3486, 925-1160 | 2650-3360, 883-1118 | 2650-3360, 883-1118 |

[0629] CAR systems comprise two CAR polypeptides, with one polypeptide comprising a repressible protease, and the other polypeptide comprising a reader domain that specifically binds to the repressible protease in the presence of a specific protease inhibitor. One or both of the polypeptides of the reader CAR system comprises an extracellular binding domain (e.g., specific for a tumor antigen), and one or both polypeptides comprise at least one intracellular signaling domain such that when the two polypeptides are brought into close proximity, binding of the cognate antigen to the extracellular binding domain results in intracellular signaling of the reader CAR system. In the presence of the specific protease inhibitor, the two polypeptides of the reader CAR system are brought together, and intracellular signaling occurs when the cognate antigen is also present. In the absence of the specific protease inhibitor, the reader domain does not bind the repressible protease, the two polypeptides of the reader CAR system are not recruited together, and no intracellular signaling occurs, even in the presence of the cognate antigen. In the presence of the another protease inhibitor that binds to the protease inhibitor but does not bind to the specific reader domain, the two polypeptides of the reader CAR system are not recruited together, and no intracellular signaling occurs, even in the presence of the cognate antigen. Thus, this drug-inducible system can only be turned on in the presence of the specific protease inhibitor that allows the repressible protease to bind to the reader domain.

[0630] In one aspect described herein is a first polypeptide of a reader CAR system, comprising: (a) an extracellular binding domain; (b) a transmembrane domain; and (c) a reader domain. In some embodiments of any of the aspects, the extracellular binding domain (e.g., of the first polypeptide of a reader CAR system) is N-terminal to the transmembrane domain, and the transmembrane domain to N-terminal to the intracellular domains (e.g., a reader domain). In some embodiments of any of the aspects, the first polypeptide of a reader CAR system further comprises at least one intracellular signaling domain as described further herein. In some embodiments of any of the aspects, the at least one intracellular signaling domain (e.g., of the first polypeptide of a reader CAR system) is N-terminal to the reader domain. In some embodiments of any of the aspects, the reader domain (e.g., of the first polypeptide of a reader CAR system) is N-terminal to the at least one intracellular signaling domain. In some embodiments of any of the aspects, the reader domain (e.g., of the first polypeptide of a reader CAR system) is N-terminal to at least one intracellular signaling domain and C-terminal to at least one intracellular signaling domain.

[0631] In some embodiments of any of the aspects, the reader domain of the first polypeptide (e.g., of the reader CAR system) comprises the danoprevir/NS3 complex reader domain (DNCR). In some embodiments of any of the aspects, the reader domain of the first polypeptide (e.g., of the reader CAR system) comprises the grazoprevir/NS3 complex reader domain (GNCR). In some embodiments of any of the aspects, the reader domain of the first polypeptide (e.g., of the reader CAR system) comprises DNCR2 (e.g., SEQ ID NO: 77, 101); GNCR1 (e.g., SEQ ID NO: 81, 105); or another reader domain as described herein. In some embodiments of any of the aspects, the first polypeptide (e.g., of the reader CAR system) comprises 1, 2, 3, 4, or at least 5 reader domains. In some embodiments of any of the aspects, the CAR polypeptide or system comprises one reader domain. In embodiments comprising multiple reader domains, the multiple reader domains can be different individual reader domains or multiple copies of the same reader domain, or a combination of the foregoing. In some embodiments of any of the aspects, the reader domain is at the C-terminus of the first reader CAR polypeptide. In some embodiments of any of the aspects, the first reader CAR polypeptide does not comprise any protease cleavage sites for the repressible protease of the second reader CAR polypeptide.

[0632] In some embodiments of any of the aspects, the reader domain of the first reader CAR polypeptide as described herein comprises SEQ ID NOs: 101 or 105 or an amino acid sequence that is at least 70%, at least 75%, at least 80%, at least 85%, at least 90%, at least 90%, at least 91%, at least 92%, at least 93%, at least 94%, at least 95%, at least 96%, at least 97%, at least 98%, or at least 99% identical to the sequence of one of SEQ ID NOs: 101 or 105 that maintains the same functions as one of SEQ ID NOs: 101 or 105 (e.g., binding to a repressible protease in the presence of a specific protease inhibitor). In some embodiments of any of the aspects, the reader domain of the first reader CAR polypeptide as described herein comprises SEQ ID NOs: 101 or 105, or an amino acid sequence that is at least 95% identical to the sequence of one of SEQ ID NOs: 101 or 105 that maintains the same function.

[0633] In some embodiments of any of the aspects, the reader domain of the first reader CAR polypeptide as described herein is encoded by a nucleic sequence comprising SEQ ID NO: 77, 81 or a sequence that is at least 70%, at least 75%, at least 80%, at least 85%, at least 90%, at least 90%, at least 91%, at least 92%, at least 93%, at least 94%, at least 95%, at least 96%, at least 97%, at least 98%, or at least 99% identical to SEQ ID NOs: 77 or 81 that maintains the same function or a codon-optimized version of SEQ ID NOs: 77 or 81. In some embodiments of any of the aspects, the reader domain of the first reader CAR polypeptide as described herein is encoded by a nucleic sequence comprising SEQ ID NOs: 77, 81 or a sequence that is at least 95% identical to SEQ ID NOs: 77 or 81 that maintains the same function.

[0634] In some embodiments of any of the aspects, the first polypeptide (e.g., of the reader CAR system) is referred to as “component a.” In some embodiments of any of the aspects, the “a” component (e.g., of the reader CAR system) comprises from the N-terminus to the C-terminus: (a) an extracellular binding domain (e.g., SEQ ID NO: 70, 94); (b) a transmembrane domain (e.g., SEQ ID NO: 11, 44); and (c) a reader domain (e.g., SEQ ID NO: 77, 81, 101, 105). In some embodiments of any of the aspects, the first polypeptide of a reader CAR system does not comprise any intracellular signaling domains (e.g., the “a component”).

[0635] In some embodiments of any of the aspects, the component a polypeptide (e.g., of the reader CAR system) as described herein comprises SEQ ID NOs: 94, 44, and 101, or SEQ ID NOs: 94, 44, and 105, or an amino acid sequence that is at least 70%, at least 75%, at least 80%, at least 85%, at least 90%, at least 90%, at least 91%, at least 92%, at least 93%, at least 94%, at least 95%, at least 96%, at least 97%, at least 98%, or at least 99% identical to a sequence comprising SEQ ID NOs: 94, 44, and 101, or SEQ ID NOs: 94, 44, and 105, that maintains the same functions as SEQ ID NOs: 94, 44, and 101 or 105. In some embodiments of any of the aspects, the component a polypeptide (e.g., of the reader CAR system) as described herein comprises SEQ ID NOs: 94, 44, and 101, or SEQ ID NOs: 94, 44, and 105, or an amino acid sequence that is at least 95% identical to a sequence comprising SEQ ID NOs: 94, 44, and 101, or SEQ ID NOs: 94, 44, and 105, that maintains the same function.

[0636] In some embodiments of any of the aspects, the component a polypeptide (e.g., of the reader CAR system) as described herein is encoded by a nucleic acid sequence comprising SEQ ID NOs: 70, 11, and 77, or SEQ ID NOs: 70, 11, and 81, or a sequence that is at least 70%, at least 75%, at least 80%, at least 85%, at least 90%, at least 90%, at least 91%, at least 92%, at least 93%, at least 94%, at least 95%, at least 96%, at least 97%, at least 98%, or at least 99% identical to a sequence comprising SEQ ID NOs: 70, 11, and 77, or SEQ ID NOs: 70, 11, and 81, that maintains the same function or a codon-optimized version thereof. In some embodiments of any of the aspects, the component a polypeptide (e.g., of the reader CAR system) as described herein is encoded by a nucleic acid sequence comprising SEQ ID NOs: 70, 11, and 77, or SEQ ID NOs: 70, 11, and 81, or a sequence that is at least 95% identical to a sequence comprising SEQ ID NOs: 70, 11, and 77, or SEQ ID NOs: 70, 11, and 81, that maintains the same function.

[0637] In some embodiments of any of the aspects, the first polypeptide (e.g., of the reader CAR system) is referred to as “component b”, “component c” or “component d.” In some embodiments of any of the aspects, the component b, c, or d polypeptide (e.g., of the reader CAR system) comprises from the N-terminus to the C-terminus: (a) an extracellular binding domain; (b) a transmembrane domain; (c) at least one intracellular signaling domain; and (d) a reader domain. In some embodiments of any of the aspects, the component b or c polypeptide (e.g., of the reader CAR system) comprises from the N-terminus to the C-terminus: (a) an extracellular binding domain; (b) a transmembrane domain; (c) a single intracellular signaling domain; and (d) a reader domain.

[0638] In some embodiments of any of the aspects, the component b polypeptide (e.g., of the reader CAR system) comprises the intracellular signaling domain of 4-1BB (e.g., SEQ ID NO: 20, 53) as the single intracellular signaling domain. In some embodiments of any of the aspects, the component b polypeptide (e.g., of the reader CAR system) comprises from the N-terminus to the C-terminus: (a) an extracellular binding domain (e.g., SEQ ID NO: 70, 94); (b) a transmembrane domain (e.g., SEQ ID NO: 11, 44); (c) a 4-1BB intracellular signaling domain (e.g., SEQ ID NO: 20, 53); and (d) a reader domain (e.g., SEQ ID NO: 77, 81, 101, 105).

[0639] In some embodiments of any of the aspects, the component b polypeptide (e.g., of the reader CAR system) as described herein comprises SEQ ID NOs: 94, 44, 53, and 101, or SEQ ID NOs: 94, 44, 53, and 105, or an amino acid sequence that is at least 70%, at least 75%, at least 80%, at least 85%, at least 90%, at least 90%, at least 91%, at least 92%, at least 93%, at least 94%, at least 95%, at least 96%, at least 97%, at least 98%, or at least 99% identical to a sequence comprising SEQ ID NOs: 94, 44, 53, and 101, or SEQ ID NOs: 94, 44, 53, and 105, that maintains the same functions as SEQ ID NOs: 94, 44, 53, and 101 or 105. In some embodiments of any of the aspects, the component b polypeptide (e.g., of the reader CAR system) as described herein comprises SEQ ID NOs: 94, 44, 53, and 101, or SEQ ID NOs: 94, 44, 53, and 105, or an amino acid sequence that is at least 95% identical to a sequence comprising SEQ ID NOs: 94, 44, 53, and 101, or SEQ ID NOs: 94, 44, 53, and 105, that maintains the same function.

[0640] In some embodiments of any of the aspects, the component b polypeptide (e.g., of the reader CAR system) as described herein is encoded by a nucleic acid sequence comprising SEQ ID NOs: 70, 11, 20, and 77, or SEQ ID NOs: 70, 11, 20, and 81, or a sequence that is at least 70%, at least 75%, at least 80%, at least 85%, at least 90%, at least 90%, at least 91%, at least 92%, at least 93%, at least 94%, at least 95%, at least 96%, at least 97%, at least 98%, or at least 99% identical to a sequence comprising SEQ ID NOs: 70, 11, 20, and 77, or SEQ ID NOs: 70, 11, 20, and 81, that maintains the same function or a codon-optimized version thereof. In some embodiments of any of the aspects, the component b polypeptide (e.g., of the reader CAR system) as described herein is encoded by a nucleic acid sequence comprising SEQ ID NOs: 70, 11, 20, and 77, or SEQ ID NOs: 70, 11, 20, and 81, or a sequence that is at least 95% identical to a sequence comprising SEQ ID NOs: 70, 11, 20, and 77, or SEQ ID NOs: 70, 11, 20, and 81, that maintains the same function.

[0641] In some embodiments of any of the aspects, the component c polypeptide (e.g., of the reader CAR system) comprises the intracellular signaling domain of CD28 (e.g., SEQ ID NO: 19, 52) as the single intracellular signaling domain. In some embodiments of any of the aspects, the component c polypeptide (e.g., of the reader CAR system) comprises from the N-terminus to the C-terminus: (a) an extracellular binding domain (e.g., SEQ ID NO: 70, 94); (b) a transmembrane domain (e.g., SEQ ID NO: 11, 44); (c) a CD28 intracellular signaling domain (e.g., SEQ ID NO: 19, 52); and (d) a reader domain (e.g., SEQ ID NO: 77, 81, 101, 105).

[0642] In some embodiments of any of the aspects, the component c polypeptide (e.g., of the reader CAR system) as described herein comprises SEQ ID NOs: 94, 44, 52, and 101, or SEQ ID NOs: 94, 44, 52, and 105, or an amino acid sequence that is at least 70%, at least 75%, at least 80%, at least 85%, at least 90%, at least 90%, at least 91%, at least 92%, at least 93%, at least 94%, at least 95%, at least 96%, at least 97%, at least 98%, or at least 99% identical to a sequence comprising SEQ ID NOs: 94, 44, 52, and 101, or SEQ ID NOs: 94, 44, 52, and 105, that maintains the same functions as SEQ ID NOs: 94, 44, 52, and 101 or 105. In some embodiments of any of the aspects, the component c polypeptide (e.g., of the reader CAR system) as described herein comprises SEQ ID NOs: 94, 44, 52, and 101, or SEQ ID NOs: 94, 44, 52, and 105, or an amino acid sequence that is at least 95% identical to a sequence comprising SEQ ID NOs: 94, 44, 52, and 101, or SEQ ID NOs: 94, 44, 52, and 105, that maintains the same function.

[0643] In some embodiments of any of the aspects, the component c polypeptide (e.g., of the reader CAR system) as described herein is encoded by a nucleic acid sequence comprising SEQ ID NOs: 70, 11, 19, and 77, or SEQ ID NOs: 70, 11, 19, and 81, or a sequence that is at least 70%, at least 75%, at least 80%, at least 85%, at least 90%, at least 90%, at least 91%, at least 92%, at least 93%, at least 94%, at least 95%, at least 96%, at least 97%, at least 98%, or at least 99% identical to a sequence comprising SEQ ID NOs: 70, 11, 19, and 77, or SEQ ID NOs: 70, 11, 19, and 81, that maintains the same function or a codon-optimized version thereof. In some embodiments of any of the aspects, the component c polypeptide (e.g., of the reader CAR system) as described herein is encoded by a nucleic acid sequence comprising SEQ ID NOs: 70, 11, 19, and 77, or SEQ ID NOs: 70, 11, 19, and 81, or a sequence that is at least 95% identical to a sequence comprising SEQ ID NOs: 70, 11, 19, and 77, or SEQ ID NOs: 70, 11, 19, and 81, that maintains the same function.

[0644] In some embodiments of any of the aspects, the component c polypeptide (e.g., of the reader CAR system) comprises residues 1-626 of SEQ ID NO: 90, residues 1-630 of SEQ ID NO: 92, residues 1-626 of SEQ ID NO: 127, or residues 1-630 of SEQ ID NO: 128, an amino acid sequence that is at least 70%, at least 75%, at least 80%, at least 85%, at least 90%, at least 90%, at least 91%, at least 92%, at least 93%, at least 94%, at least 95%, at least 96%, at least 97%, at least 98%, or at least 99% identical to a sequence comprising residues 1-626 of SEQ ID NO: 90, residues 1-630 of SEQ ID NO: 92, residues 1-626 of SEQ ID NO: 127, or residues 1-630 of SEQ ID NO: 128, that maintains the same functions (e.g., target cell binding, reader domain, etc.). In some embodiments of any of the aspects, the component c polypeptide (e.g., of the reader CAR system) comprises residues 1-626 of SEQ ID NO: 90, residues 1-630 of SEQ ID NO: 92, residues 1-626 of SEQ ID NO: 127, or residues 1-630 of SEQ ID NO: 128, an amino acid sequence that is at least 95% identical to a sequence comprising residues 1-626 of SEQ ID NO: 90, residues 1-630 of SEQ ID NO: 92, residues 1-626 of SEQ ID NO: 127, or residues 1-630 of SEQ ID NO: 128, that maintains the same function.

[0645] In some embodiments of any of the aspects, the component c polypeptide (e.g., of the reader CAR system) is encoded by a nucleic acid sequence comprising nucleotides 1-1881 of SEQ ID NO: 66, nucleotides 1-1893 of SEQ ID NO: 68, nucleotides 1-1881 of SEQ ID NO: 125, nucleotides 1-1893 of SEQ ID NO: 126, or a sequence that is at least 70%, at least 75%, at least 80%, at least 85%, at least 90%, at least 90%, at least 91%, at least 92%, at least 93%, at least 94%, at least 95%, at least 96%, at least 97%, at least 98%, or at least 99% identical to a sequence comprising nucleotides 1-1881 of SEQ ID NO: 66, nucleotides 1-1893 of SEQ ID NO: 68, nucleotides 1-1881 of SEQ ID NO: 125, nucleotides 1-1893 of SEQ ID NO: 126 that maintains the same function or a codon-optimized version of nucleotides 1-1881 of SEQ ID NO: 66, nucleotides 1-1893 of SEQ ID NO: 68, nucleotides 1-1881 of SEQ ID NO: 125, nucleotides 1-1893 of SEQ ID NO: 126. In some embodiments of any of the aspects, the component c polypeptide (e.g., of the reader CAR system) is encoded by a nucleic acid sequence comprising nucleotides 1-1881 of SEQ ID NO: 66, nucleotides 1-1893 of SEQ ID NO: 68, nucleotides 1-1881 of SEQ ID NO: 125, nucleotides 1-1893 of SEQ ID NO: 126, or a sequence that is at least 95% identical to a sequence comprising nucleotides 1-1881 of SEQ ID NO: 66, nucleotides 1-1893 of SEQ ID NO: 68, nucleotides 1-1881 of SEQ ID NO: 125, nucleotides 1-1893 of SEQ ID NO: 126 that maintains the same function.

[0646] In some embodiments of any of the aspects, the component d polypeptide (e.g., of the reader CAR system) comprises from the N-terminus to the C-terminus: (a) an extracellular binding domain; (b) a transmembrane domain; (c) a first intracellular signaling domain; (d) a second intracellular signaling domain; and (e) a reader domain. In some embodiments of any of the aspects, the first (or second) intracellular signaling domain of the component d polypeptide (e.g., of the reader CAR system) comprises the intracellular signaling domain of CD28 (e.g., SEQ ID NO: 19, 52). In some embodiments of any of the aspects, the second (or first) intracellular signaling domain of the component d polypeptide (e.g., of the reader CAR system) comprises the intracellular signaling domain of 4-1BB (e.g., SEQ ID NO: 20, 53). In some embodiments of any of the aspects, the component d polypeptide (e.g., of the reader CAR system) comprises from the N-terminus to the C-terminus: (a) an extracellular binding domain (e.g., SEQ ID NO: 70, 94); (b) a transmembrane domain (e.g., SEQ ID NO: 11, 44); (c) a CD28 intracellular signaling domain (e.g., SEQ ID NO: 19, 52); (d) a 4-1BB intracellular signaling domain (e.g., SEQ ID NO: 20, 53); and (e) a reader domain (e.g., SEQ ID NO: 77, 81, 101, 105).

[0647] In some embodiments of any of the aspects, the component d polypeptide (e.g., of the reader CAR system) as described herein comprises SEQ ID NOs: 94, 44, 52, 53, and 101, or SEQ ID NOs: 94, 44, 52, 53, and 105, or an amino acid sequence that is at least 70%, at least 75%, at least 80%, at least 85%, at least 90%, at least 90%, at least 91%, at least 92%, at least 93%, at least 94%, at least 95%, at least 96%, at least 97%, at least 98%, or at least 99% identical to a sequence comprising SEQ ID NOs: 94, 44, 52, 53, and 101, or SEQ ID NOs: 94, 44, 52, 53, and 105, that maintains the same functions as SEQ ID NOs: 94, 44, 52, 53, and 101 or 105. In some embodiments of any of the aspects, the component d polypeptide (e.g., of the reader CAR system) as described herein comprises SEQ ID NOs: 94, 44, 52, 53, and 101, or SEQ ID NOs: 94, 44, 52, 53, and 105, or an amino acid sequence that is at least 95% identical to a sequence comprising SEQ ID NOs: 94, 44, 52, 53, and 101, or SEQ ID NOs: 94, 44, 52, 53, and 105, that maintains the same function.

[0648] In some embodiments of any of the aspects, the component d polypeptide (e.g., of the reader CAR system) as described herein is encoded by a nucleic acid sequence comprising SEQ ID NOs: 70, 11, 19, 20, and 77, or SEQ ID NOs: 70, 11, 19, 20, and 81, or a sequence that is at least 70%, at least 75%, at least 80%, at least 85%, at least 90%, at least 90%, at least 91%, at least 92%, at least 93%, at least 94%, at least 95%, at least 96%, at least 97%, at least 98%, or at least 99% identical to a sequence comprising SEQ ID NOs: 70, 11, 19, 20, and 77, or SEQ ID NOs: 70, 11, 19, 20, and 81, that maintains the same function or a codon-optimized version thereof. In some embodiments of any of the aspects, the component d polypeptide (e.g., of the reader CAR system) as described herein is encoded by a nucleic acid sequence comprising SEQ ID NOs: 70, 11, 19, 20, and 77, or SEQ ID NOs: 70, 11, 19, 20, and 81, or a sequence that is at least 95% identical to a sequence comprising SEQ ID NOs: 70, 11, 19, 20, and 77, or SEQ ID NOs: 70, 11, 19, 20, and 81, that maintains the same function.

[0649] In some embodiments of any of the aspects, the component d polypeptide (e.g., of the reader CAR system) comprises residues 1-668 of SEQ ID NO: 91, residues 1-672 of SEQ ID NO: 93, or an amino acid sequence that is at least 70%, at least 75%, at least 80%, at least 85%, at least 90%, at least 90%, at least 91%, at least 92%, at least 93%, at least 94%, at least 95%, at least 96%, at least 97%, at least 98%, or at least 99% identical to a sequence comprising residues 1-668 of SEQ ID NO: 91 or residues 1-672 of SEQ ID NO: 93 that maintains the same functions as SEQ ID NO: 85 (e.g., target cell binding, reader domain etc.). In some embodiments of any of the aspects, the component d polypeptide (e.g., of the reader CAR system) comprises residues 1-668 of SEQ ID NO: 91, residues 1-672 of SEQ ID NO: 93, or an amino acid sequence that is at least 95% identical to a sequence comprising residues 1-668 of SEQ ID NO: 91 or residues 1-672 of SEQ ID NO: 93 that maintains the same function.

[0650] In some embodiments of any of the aspects, the component d polypeptide (e.g., of the reader CAR system) is encoded by a nucleic acid sequence comprising nucleotides 1-2007 of SEQ ID NO: 67, nucleotides 1-2019 of SEQ ID NO: 69 or a sequence that is at least 70%, at least 75%, at least 80%, at least 85%, at least 90%, at least 90%, at least 91%, at least 92%, at least 93%, at least 94%, at least 95%, at least 96%, at least 97%, at least 98%, or at least 99% identical to a sequence comprising nucleotides 1-2007 of SEQ ID NO: 67 or nucleotides 1-2019 of SEQ ID NO: 69 that maintains the same function or a codon-optimized version of nucleotides 1-2007 of SEQ ID NO: 67 or nucleotides 1-2019 of SEQ ID NO: 69. In some embodiments of any of the aspects, the component d polypeptide (e.g., of the reader CAR system) is encoded by a nucleic acid sequence comprising nucleotides 1-2007 of SEQ ID NO: 67, nucleotides 1-2019 of SEQ ID NO: 69 or a sequence that is at least 95% identical to a sequence comprising nucleotides 1-2007 of SEQ ID NO: 67 or nucleotides 1-2019 of SEQ ID NO: 69 that maintains the same function.

[0651] In some embodiments of any of the aspects, the extracellular binding domain of the first reader CAR polypeptide is an antibody, an antigen-binding fragment thereof, a F(ab) fragment, a F(ab′) fragment, a single chain variable fragment (scFv), or a single-domain antibody (sdAb). In some embodiments of any of the aspects, the extracellular binding domain of the first reader CAR polypeptide comprises a scFv. In some embodiments of any of the aspects, the extracellular binding domain of the first reader CAR polypeptide binds to a tumor antigen, as described further herein. In some embodiments of any of the aspects, the first reader CAR polypeptide comprises a leading peptide located N-terminal to the extracellular binding domain. In some embodiments of any of the aspects, the leading peptide is CD8alpha leading peptide or another leading peptide as described herein.

[0652] In some embodiments of any of the aspects, the transmembrane domain is located between the extracellular binding domain and the at least one intracellular signaling domain. The transmembrane domain of the first reader CAR polypeptide can be any known transmembrane domain. In one embodiment, the transmembrane domain of the first reader CAR polypeptide comprises the transmembrane domain of CD28. In some embodiments of any of the aspects, the first reader CAR polypeptide comprises a spacer domain located between the extracellular binding domain and the transmembrane domain. In some embodiments of any of the aspects, the spacer domain comprises a CD8a hinge domain or another spacer domain as described herein.

[0653] In some embodiments of any of the aspects, the first reader CAR polypeptide comprises 0, 1, 2, 3, 4, 5, or more intracellular signaling domains. In embodiments comprising multiple intracellular signaling domains, the multiple repressible proteases can be different individual intracellular signaling domains or multiple copies of the same intracellular signaling domain, or a combination of the foregoing. In some embodiments of any of the aspects, the intracellular signaling domain (e.g., of the first reader CAR polypeptide), if it is present, comprises at least one intracellular signaling domain selected from the group consisting of: TCRC; FcRy; FcRp; CD3zeta; CD3y; CD35; CD3s; CD3C; CD22; CD79a; CD79b; CD66d; CARD11; CD2; CD7; CD27; CD28; CD30; CD40; CD54 (ICAM); CD83; CD134 (OX40); CD137 (4-1BB); CD150 (SLAMF1); CD152 (CTLA4); CD223 (LAG3); CD270 (HVEM); CD273 (PD-L2); CD274 (PD-Ll); CD278 (ICOS); DAP10; LAT; KD2C SLP76; TRIM; ZAP70; and 41BB. In some embodiments of any of the aspects, the first reader CAR polypeptide comprises the intracellular signaling domain of CD28 and/or 4-1BB.

[0654] In some embodiments of any of the aspects, the first reader CAR polypeptide comprises at least one detectable marker as described herein. As a non-limiting example, the at least one detectable marker can be used to detect the expression of the first reader CAR polypeptide. In some embodiments of any of the aspects, the first reader CAR polypeptide comprises a detectable marker adjacent to and C terminal of the extracellular binding domain. As a non-limiting example, the detectable marker(s) can be selected from GFP, V5, HA1, Myc, VSV-G, HSV, FLAG, HIS, mCherry, AU1, and biotin or another detectable marker as described herein (see e.g., Tables 5 and 9).

[0655] In one aspect described herein is a second polypeptide of a reader CAR system, comprising: (a) a repressible protease and (b) at least one intracellular signaling domain. In some embodiments of any of the aspects, the second polypeptide of a reader CAR system does not comprise an extracellular domain and/or a transmembrane; accordingly, the second polypeptide of a reader CAR system can be an intracellular protein, as opposed to a transmembrane protein (see e.g., FIG. 12A).

[0656] In one aspect described herein is a second polypeptide of a reader CAR system, comprising: (a) an extracellular domain; (b) a transmembrane domain; (c) a repressible protease; and (d) at least one intracellular signaling domain. In some embodiments of any of the aspects, the extracellular domain (e.g., of the second polypeptide of a reader CAR system) is N-terminal to the transmembrane domain, and the transmembrane domain to N-terminal to the intracellular domains (e.g., repressible protease and at least one intracellular signaling domain). In some embodiments of any of the aspects, the at least one intracellular signaling domain (e.g., of the second polypeptide of a reader CAR system) is N-terminal to the repressible protease. In some embodiments of any of the aspects, the repressible protease (e.g., of the second polypeptide of a reader CAR system) is N-terminal to the at least one intracellular signaling domain. In some embodiments of any of the aspects, the repressible protease (e.g., of the second polypeptide of a reader CAR system) is N-terminal to at least one intracellular signaling domain and C-terminal to at least one intracellular signaling domain.

[0657] In some embodiments of any of the aspects, the second reader CAR polypeptide comprises 1, 2, 3, 4, 5, or more repressible protease(s). In embodiments comprising multiple repressible proteases, the multiple repressible proteases can be different individual repressible proteases or multiple copies of the same repressible protease, or a combination of the foregoing. In one embodiment, the second reader CAR polypeptide comprises one repressible protease. In some embodiments of any of the aspects, the repressible protease (e.g., of the second reader CAR polypeptide) is hepatitis C virus (HCV) nonstructural protein 3 (NS3). In some embodiments of any of the aspects, the repressible protease of the second reader CAR polypeptide comprises NS3 genotype 1A (e.g., SEQ ID NO: 79, 103). In some embodiments of any of the aspects, the repressible protease of the second reader CAR polypeptide comprises NS3 genotype 1B (e.g., SEQ ID NO: 75, 99).

[0658] In some embodiments of any of the aspects, the repressible protease of the second reader CAR polypeptide as described herein comprises SEQ ID NOs: 99, 103, or an amino acid sequence that is at least 70%, at least 75%, at least 80%, at least 85%, at least 90%, at least 90%, at least 91%, at least 92%, at least 93%, at least 94%, at least 95%, at least 96%, at least 97%, at least 98%, or at least 99% identical to the sequence of SEQ ID NOs: 99 or 103 that maintains the same function. In some embodiments of any of the aspects, the repressible protease of the second reader CAR polypeptide as described herein comprises SEQ ID NOs: 99 or 103, or an amino acid sequence that is at least 95% identical to the sequence of SEQ ID NOs: 99 or 103, that maintains the same function.

[0659] In some embodiments of any of the aspects, the repressible protease of the second reader CAR polypeptide as described herein is encoded by a nucleic acid sequence comprising SEQ ID NOs: 75, 79 or a sequence that is at least 70%, at least 75%, at least 80%, at least 85%, at least 90%, at least 90%, at least 91%, at least 92%, at least 93%, at least 94%, at least 95%, at least 96%, at least 97%, at least 98%, or at least 99% identical to SEQ ID NOs: 75 or 79, that maintains the same function or a codon-optimized version of SEQ ID NOs: 75 or 79. In some embodiments of any of the aspects, the repressible protease of the second reader CAR polypeptide as described herein is encoded by a nucleic acid sequence comprising SEQ ID NOs: 75 or 79, or a sequence that is at least 95% identical to SEQ ID NOs: 75 or 79, that maintains the same function.

[0660] In some embodiments of any of the aspects, the repressible protease of the second reader CAR polypeptide is catalytically inactive (i.e., dead). For NS3 genotypes 1A and 1B, the catalytic triad comprises His-57, Asp-81, and Ser-139. Accordingly, a catalytically inactive NS3 protease can comprise a nonsynonymous mutation at any one of His-57, Asp-81, and Ser-139, or another inactivating mutation as described herein. In some embodiments of any of the aspects, the NS3 protease (e.g., of the second reader CAR polypeptide) comprises an S139A mutation. In regard to a repressible protease, “catalytically inactive” refers to the inability to cleave at a protease cleavage site. In some embodiments of any of the aspects, the catalytically inactive repressible protease retains the ability to specifically bind to the reader domain of the first reader CAR polypeptide in the presence of a specific protease inhibitor, but the catalytically inactive repressible protease does not cleave the reader domain. In some embodiments of any of the aspects, the second reader CAR polypeptide does not comprise any protease cleavage sites for the repressible protease. In some embodiments of any of the aspects, the repressible protease (e.g., of the second reader CAR polypeptide) can be any repressible protease as described further herein, e.g., that binds to the reader domain of the first reader CAR polypeptide.

[0661] In some embodiments of any of the aspects, the repressible protease (e.g., of the second reader CAR polypeptide) is located: (a) between the transmembrane domain and the at least one intracellular signaling domain; (b) between the first intracellular signaling domain and the second intracellular signaling domain; or (c) at the C terminus of the polypeptide. In some embodiments of any of the aspects, the repressible protease (e.g., of the second reader CAR polypeptide) is located: (a) between the transmembrane domain and the at least one intracellular signaling domain. In some embodiments of any of the aspects, the repressible protease (e.g., of the second reader CAR polypeptide) is located: (b) between the first intracellular signaling domain and the second intracellular signaling domain. In some embodiments of any of the aspects, the repressible protease (e.g., of the second reader CAR polypeptide) is located: (c) at the C terminus of the polypeptide.

[0662] In some embodiments of any of the aspects, the repressible protease (e.g., of the second reader CAR polypeptide) is located: (a) between the transmembrane domain and the at least one intracellular signaling domain; and (b) between the first intracellular signaling domain and the second intracellular signaling domain. In some embodiments of any of the aspects, the repressible protease (e.g., of the second reader CAR polypeptide) is located: (a) between the transmembrane domain and the at least one intracellular signaling domain; and (c) at the C terminus of the polypeptide. In some embodiments of any of the aspects, the repressible protease (e.g., of the second reader CAR polypeptide) is located: (b) between the first intracellular signaling domain and the second intracellular signaling domain; and (c) at the C terminus of the polypeptide. In some embodiments of any of the aspects, the repressible protease (e.g., of the second reader CAR polypeptide) is located: (a) between the transmembrane domain and the at least one intracellular signaling domain; (b) between the first intracellular signaling domain and the second intracellular signaling domain; and (c) at the C terminus of the polypeptide.

[0663] In some embodiments of any of the aspects, the second reader CAR polypeptide is in combination with a protease inhibitor bound to the repressible protease. In some embodiments of any of the aspects, the second reader CAR polypeptide is bound to a protease inhibitor bound to the repressible protease. In some embodiments of any of the aspects, the second reader CAR polypeptide is bound specifically to a protease inhibitor bound to the repressible protease. Non-limiting examples of protease inhibitors (e.g., for NS3) include grazoprevir (GZV), danoprevir, simeprevir, asunaprevir, ciluprevir, boceprevir, sovaprevir, paritaprevir, ombitasvir, paritaprevir, ritonavir, dasabuvir, and telaprevir; further examples are described herein.

[0664] In some embodiments of any of the aspects, the protease inhibitor is specific to the reader domain of the first reader CAR polypeptide. As a non-limiting example, grazoprevir is in combination with the second reader CAR polypeptide, and the first reader CAR polypeptide comprises a GNCR reader domain. As another non-limiting example, danoprevir is in combination with the second reader CAR polypeptide, and the first reader CAR polypeptide comprises a DNCR reader domain. In some embodiments of any of the aspects, the second reader CAR polypeptide binds to the reader domain of the first reader CAR polypeptide when the specific protease inhibitor is bound to the repressible protease.

[0665] In some embodiments of any of the aspects, the second reader CAR polypeptide further comprises a cofactor for the repressible protease. In some embodiments of any of the aspects, the cofactor (e.g., for NS3) is an HSV NS4A domain, as described further herein. In one embodiment, the second reader CAR polypeptide comprises genotype 1A NS4A (e.g., SEQ ID NO: 15, 48). In some embodiments of any of the aspects, the HSV NS4A domain is adjacent and N-terminal to the repressible protease (e.g., NS3).

[0666] In some embodiments of any of the aspects, the cofactor for the repressible protease of the second reader CAR polypeptide as described herein comprises SEQ ID NO: 48, or an amino acid sequence that is at least 70%, at least 75%, at least 80%, at least 85%, at least 90%, at least 90%, at least 91%, at least 92%, at least 93%, at least 94%, at least 95%, at least 96%, at least 97%, at least 98%, or at least 99% identical to the sequence of SEQ ID NO: 48 that maintains the same function. In some embodiments of any of the aspects, the cofactor for the repressible protease of the second reader CAR polypeptide as described herein comprises SEQ ID NO: 48, or an amino acid sequence that is at least 95% identical to the sequence of SEQ ID NO: 48 that maintains the same function.

[0667] In some embodiments of any of the aspects, the cofactor for the repressible protease of the second reader CAR polypeptide as described herein is encoded by a nucleic acid sequence comprising SEQ ID NO: 15, or a sequence that is at least 70%, at least 75%, at least 80%, at least 85%, at least 90%, at least 90%, at least 91%, at least 92%, at least 93%, at least 94%, at least 95%, at least 96%, at least 97%, at least 98%, or at least 99% identical to SEQ ID NO: 15 that maintains the same function or a codon-optimized version of SEQ ID NO: 15. In some embodiments of any of the aspects, the cofactor for the repressible protease of the second reader CAR polypeptide as described herein is encoded by a nucleic acid sequence comprising SEQ ID NO: 15, or a sequence that is at least 95% identical to SEQ ID NO: 15 that maintains the same function.

[0668] In some embodiments of any of the aspects, the second polypeptide (e.g., of the reader CAR system) is referred to as “component i.” In some embodiments of any of the aspects, the component i polypeptide (e.g., of the reader CAR system) comprises from the N-terminus to the C-terminus: (a) an extracellular domain; (b) a transmembrane domain; (c) at least one intracellular signaling domain; (d) a repressible protease; and (e) at least one intracellular signaling domain. In some embodiments of any of the aspects, the component i polypeptide (e.g., of the reader CAR system) comprises from the N-terminus to the C-terminus: (a) an extracellular domain; (b) a transmembrane domain; (c) a first intracellular signaling domain; (d) a repressible protease; and (e) a second intracellular signaling domain. In some embodiments of any of the aspects, the first intracellular signalling domain of component i (e.g., of the second reader CAR polypeptide) comprises the intracellular signaling domain of 4-1BB. In some embodiments of any of the aspects, the second intracellular signalling domain of component i (e.g., of the second reader CAR polypeptide) comprises the intracellular signaling domain of CD3zeta.

[0669] In some embodiments of any of the aspects, the component i polypeptide (e.g., of the reader CAR system) comprises SEQ ID NO: 86, residues 648-1313 of SEQ ID NO: 90, residues 690-1355 of SEQ ID NO: 91, residues 652-1317 of SEQ ID NO: 92, residues 694-1359 of SEQ ID NO: 93, residues 648-1303 of SEQ ID NO: 127, or residues 652-1307 of SEQ ID NO: 128, or an amino acid sequence that is at least 70%, at least 75%, at least 80%, at least 85%, at least 90%, at least 90%, at least 91%, at least 92%, at least 93%, at least 94%, at least 95%, at least 96%, at least 97%, at least 98%, or at least 99% identical to SEQ ID NO: 86, residues 648-1313 of SEQ ID NO: 90, residues 690-1355 of SEQ ID NO: 91, residues 652-1317 of SEQ ID NO: 92, residues 694-1359 of SEQ ID NO: 93, residues 648-1303 of SEQ ID NO: 127, or residues 652-1307 of SEQ ID NO: 128, that maintains the same functions (e.g., CD3zeta signaling, etc.). In some embodiments of any of the aspects, the component i polypeptide (e.g., of the reader CAR system) comprises residues 648-1313 of SEQ ID NO: 90, residues 690-1355 of SEQ ID NO: 91, residues 652-1317 of SEQ ID NO: 92, residues 694-1359 of SEQ ID NO: 93, residues 648-1303 of SEQ ID NO: 127, or residues 652-1307 of SEQ ID NO: 128, SEQ ID NO: 86, or an amino acid sequence that is at least 95% identical to SEQ ID NO: 86, residues 648-1313 of SEQ ID NO: 90, residues 690-1355 of SEQ ID NO: 91, residues 652-1317 of SEQ ID NO: 92, residues 694-1359 of SEQ ID NO: 93, residues 648-1303 of SEQ ID NO: 127, or residues 652-1307 of SEQ ID NO: 128, that maintains the same function.

[0670] In some embodiments of any of the aspects, the component i polypeptide (e.g., of the reader CAR system) is encoded by a nucleic acid sequence comprising SEQ ID NO: 62, nucleotides 1945-3942 of SEQ ID NO: 66, nucleotides 2071-4068 of SEQ ID NO: 67, nucleotides 1957-3954 of SEQ ID NO: 68, nucleotides 2083-4080 of SEQ ID NO: 69, nucleotides 1945-3915 of SEQ ID NO: 125, nucleotides 1957-3927 of SEQ ID NO: 126, or a sequence that is at least 70%, at least 75%, at least 80%, at least 85%, at least 90%, at least 90%, at least 91%, at least 92%, at least 93%, at least 94%, at least 95%, at least 96%, at least 97%, at least 98%, or at least 99% identical to a sequence comprising SEQ ID NO: 62, nucleotides 1945-3942 of SEQ ID NO: 66, nucleotides 2071-4068 of SEQ ID NO: 67, nucleotides 1957-3954 of SEQ ID NO: 68, nucleotides 2083-4080 of SEQ ID NO: 69, nucleotides 1945-3915 of SEQ ID NO: 125, or nucleotides 1957-3927 of SEQ ID NO: 126, that maintains the same function or a codon-optimized version thereof. In some embodiments of any of the aspects, the component i polypeptide (e.g., of the reader CAR system) is encoded by a nucleic acid sequence comprising SEQ ID NO: 62, nucleotides 1945-3942 of SEQ ID NO: 66, nucleotides 2071-4068 of SEQ ID NO: 67, nucleotides 1957-3954 of SEQ ID NO: 68, nucleotides 2083-4080 of SEQ ID NO: 69, nucleotides 1945-3915 of SEQ ID NO: 125, or nucleotides 1957-3927 of SEQ ID NO: 126, or a sequence that is at least 95% identical to a sequence comprising SEQ ID NO: 62, nucleotides 1945-3942 of SEQ ID NO: 66, nucleotides 2071-4068 of SEQ ID NO: 67, nucleotides 1957-3954 of SEQ ID NO: 68, nucleotides 2083-4080 of SEQ ID NO: 69, nucleotides 1945-3915 of SEQ ID NO: 125, or nucleotides 1957-3927 of SEQ ID NO: 126, that maintains the same function.

[0671] In some embodiments of any of the aspects, the second polypeptide (e.g., of the reader CAR system) is referred to as “component ii” or “component iv.” In some embodiments of any of the aspects, the component ii or component iv polypeptide (e.g., of the reader CAR system) comprises from the N-terminus to the C-terminus: (a) an extracellular domain; (b) a transmembrane domain; (c) at least one intracellular signaling domain; and (d) a repressible protease. In some embodiments of any of the aspects, the component ii polypeptide (e.g., of the reader CAR system) comprises from the N-terminus to the C-terminus: (a) an extracellular domain (e.g., SEQ ID NO: 72, 96); (b) a transmembrane domain (e.g., SEQ ID NO: 73, 97); (c) a first intracellular signaling domain; (d) a second intracellular signaling domain; and (e) a repressible protease (e.g., SEQ ID NO: 75, 79, 99, 103).

[0672] In some embodiments of any of the aspects, the first intracellular signalling domain of component ii (e.g., of the second reader CAR polypeptide) comprises the intracellular signaling domain of 4-1BB (e.g., SEQ ID NO: 20, 53). In some embodiments of any of the aspects, the second intracellular signalling domain of component ii (e.g., of the second reader CAR polypeptide) comprises the intracellular signaling domain of CD3zeta (e.g., SEQ ID NO: 21, 54).

[0673] In some embodiments of any of the aspects, the component ii polypeptide (e.g., of the reader CAR system) as described herein comprises SEQ ID NOs: 96, 97, 53, 54, and 99, or SEQ ID NOs: 96, 97, 53, 54, and 103, or an amino acid sequence that is at least 70%, at least 75%, at least 80%, at least 85%, at least 90%, at least 90%, at least 91%, at least 92%, at least 93%, at least 94%, at least 95%, at least 96%, at least 97%, at least 98%, or at least 99% identical to a sequence comprising SEQ ID NOs: 96, 97, 53, 54, and 99, or SEQ ID NOs: 96, 97, 53, 54, and 103, that maintains the same functions as SEQ ID NOs: 96, 97, 53, 54, and 99 or 103. In some embodiments of any of the aspects, the component ii polypeptide (e.g., of the reader CAR system) as described herein comprises SEQ ID NOs: 96, 97, 53, 54, and 99, or SEQ ID NOs: 96, 97, 53, 54, and 103, or an amino acid sequence that is at least 95% identical to a sequence comprising SEQ ID NOs: 96, 97, 53, 54, and 99, or SEQ ID NOs: 96, 97, 53, 54, and 103, that maintains the same functions as SEQ ID NOs: 96, 97, 53, 54, and 99 or 103.

[0674] In some embodiments of any of the aspects, the component ii polypeptide (e.g., of the reader CAR system) as described herein is encoded by a nucleic acid sequence comprising SEQ ID NOs: 72, 73, 20, 21, and 75, or SEQ ID NOs: 72, 73, 20, 21, and 79, or a sequence that is at least 70%, at least 75%, at least 80%, at least 85%, at least 90%, at least 90%, at least 91%, at least 92%, at least 93%, at least 94%, at least 95%, at least 96%, at least 97%, at least 98%, or at least 99% identical to a sequence comprising SEQ ID NOs: 72, 73, 20, 21, and 75, or SEQ ID NOs: 72, 73, 20, 21, and 79, that maintains the same function or a codon-optimized version thereof. In some embodiments of any of the aspects, the component ii polypeptide (e.g., of the reader CAR system) as described herein is encoded by a nucleic acid sequence comprising SEQ ID NOs: 72, 73, 20, 21, and 75, or SEQ ID NOs: 72, 73, 20, 21, and 79, or a sequence that is at least 95% identical to a sequence comprising SEQ ID NOs: 72, 73, 20, 21, and 75, or SEQ ID NOs: 72, 73, 20, 21, and 79.

[0675] In some embodiments of any of the aspects, the component ii polypeptide (e.g., of the reader CAR system) comprises SEQ ID NO: 87 or an amino acid sequence that is at least 70%, at least 75%, at least 80%, at least 85%, at least 90%, at least 90%, at least 91%, at least 92%, at least 93%, at least 94%, at least 95%, at least 96%, at least 97%, at least 98%, or at least 99% identical to the sequence of SEQ ID NO: 87 that maintains the same functions as SEQ ID NO: 87 (e.g., CD3zeta signaling, etc.). In some embodiments of any of the aspects, the component ii polypeptide (e.g., of the reader CAR system) comprises SEQ ID NO: 87 or an amino acid sequence that is at least 95% identical to the sequence of SEQ ID NO: 87 that maintains the same functions as SEQ ID NO: 87 (e.g., CD3zeta signaling, etc.).

[0676] In some embodiments of any of the aspects, the component ii polypeptide (e.g., of the reader CAR system) is encoded by a nucleic acid sequence comprising SEQ ID NO: 63 or a sequence that is at least 70%, at least 75%, at least 80%, at least 85%, at least 90%, at least 90%, at least 91%, at least 92%, at least 93%, at least 94%, at least 95%, at least 96%, at least 97%, at least 98%, or at least 99% identical to SEQ ID NO: 63 that maintains the same function or a codon-optimized version of SEQ ID NO: 63. In some embodiments of any of the aspects, the component ii polypeptide (e.g., of the reader CAR system) is encoded by a nucleic acid sequence comprising SEQ ID NO: 63 or a sequence that is at least 95% identical to SEQ ID NO: 63 that maintains the same function.

[0677] In some embodiments of any of the aspects, the second polypeptide (e.g., of the reader CAR system) is referred to as “component iii.” In some embodiments of any of the aspects, the component iii polypeptide (e.g., of the reader CAR system) comprises from the N-terminus to the C-terminus: (a) an extracellular domain (e.g., SEQ ID NO: 72, 96); (b) a transmembrane domain (e.g., SEQ ID NO: 73, 97); (c) a repressible protease (e.g., SEQ ID NO: 75, 79, 99, 103); and (d) at least one intracellular signaling domain. In some embodiments of any of the aspects, the component iii polypeptide (e.g., of the reader CAR system) comprises from the N-terminus to the C-terminus: (a) an extracellular domain (e.g., SEQ ID NO: 72, 96); (b) a transmembrane domain (e.g., SEQ ID NO: 73, 97); (c) a repressible protease (e.g., SEQ ID NO: 75, 79, 99, 103); and (d) a single intracellular signaling domain. In some embodiments of any of the aspects, the single intracellular signalling domain of component iii (e.g., of the second reader CAR polypeptide) comprises the intracellular signaling domain of CD3zeta (e.g., SEQ ID NO: 21, 54).

[0678] In some embodiments of any of the aspects, the component iii polypeptide (e.g., of the reader CAR system) comprises SEQ ID NO: 88 or an amino acid sequence that is at least 70%, at least 75%, at least 80%, at least 85%, at least 90%, at least 90%, at least 91%, at least 92%, at least 93%, at least 94%, at least 95%, at least 96%, at least 97%, at least 98%, or at least 99% identical to the sequence of SEQ ID NO: 88 that maintains the same functions as SEQ ID NO: 88 (e.g., CD3zeta signaling, etc.). In some embodiments of any of the aspects, the component iii polypeptide (e.g., of the reader CAR system) comprises SEQ ID NO: 88 or an amino acid sequence that is at least 95% identical to the sequence of SEQ ID NO: 88 that maintains the same functions as SEQ ID NO: 88 (e.g., CD3zeta signaling, etc.).

[0679] In some embodiments of any of the aspects, the component iii polypeptide (e.g., of the reader CAR system) is encoded by a nucleic acid sequence comprising SEQ ID NO: 64 or a sequence that is at least 70%, at least 75%, at least 80%, at least 85%, at least 90%, at least 90%, at least 91%, at least 92%, at least 93%, at least 94%, at least 95%, at least 96%, at least 97%, at least 98%, or at least 99% identical to SEQ ID NO: 64 that maintains the same function or a codon-optimized version of SEQ ID NO: 64. In some embodiments of any of the aspects, the component iii polypeptide (e.g., of the reader CAR system) is encoded by a nucleic acid sequence comprising SEQ ID NO: 64 or a sequence that is at least 95% identical to SEQ ID NO: 64 that maintains the same function.

[0680] In some embodiments of any of the aspects, the component iv polypeptide (e.g., of the reader CAR system) comprises from the N-terminus to the C-terminus: (a) an extracellular domain (e.g., SEQ ID NO: 72, 96); (b) a transmembrane domain (e.g., SEQ ID NO: 73, 97); (c) a single intracellular signaling domain; and (d) a repressible protease (e.g., SEQ ID NO: 75, 79, 99, 103). In some embodiments of any of the aspects, the single intracellular signalling domain of component iv (e.g., of the second reader CAR polypeptide) comprises the intracellular signaling domain of CD3zeta (e.g., SEQ ID NO: 21, 54).

[0681] In some embodiments of any of the aspects, the component iv polypeptide (e.g., of the reader CAR system) comprises SEQ ID NO: 89 or an amino acid sequence that is at least 70%, at least 75%, at least 80%, at least 85%, at least 90%, at least 90%, at least 91%, at least 92%, at least 93%, at least 94%, at least 95%, at least 96%, at least 97%, at least 98%, or at least 99% identical to the sequence of SEQ ID NO: 89 that maintains the same functions as SEQ ID NO: 89 (e.g., CD3zeta signaling, etc.). In some embodiments of any of the aspects, the component iv polypeptide (e.g., of the reader CAR system) comprises SEQ ID NO: 89 or an amino acid sequence that is at least 95% identical to the sequence of SEQ ID NO: 89 that maintains the same function.

[0682] In some embodiments of any of the aspects, the component iv polypeptide (e.g., of the reader CAR system) is encoded by a nucleic acid sequence comprising SEQ ID NO: 65 or a sequence that is at least 70%, at least 75%, at least 80%, at least 85%, at least 90%, at least 90%, at least 91%, at least 92%, at least 93%, at least 94%, at least 95%, at least 96%, at least 97%, at least 98%, or at least 99% identical to SEQ ID NO: 65 that maintains the same function or a codon-optimized version of SEQ ID NO: 65. In some embodiments of any of the aspects, the component iv polypeptide (e.g., of the reader CAR system) is encoded by a nucleic acid sequence comprising SEQ ID NO: 65 or a sequence that is at least 95% identical to SEQ ID NO: 65 that maintains the same function.

[0683] In some embodiments of any of the aspects, the component iii polypeptide or component iv polypeptide (e.g., of the reader CAR system) as described herein comprises SEQ ID NOs: 96, 97, 99, 54, and 99, or SEQ ID NOs: 96, 97, 54, and 103, or an amino acid sequence that is at least 70%, at least 75%, at least 80%, at least 85%, at least 90%, at least 90%, at least 91%, at least 92%, at least 93%, at least 94%, at least 95%, at least 96%, at least 97%, at least 98%, or at least 99% identical to a sequence comprising SEQ ID NOs: 96, 97, 54, and 99, or SEQ ID NOs: 96, 97, 54, and 103, that maintains the same functions as SEQ ID NOs: 96, 97, 54, and 99 or 103. In some embodiments of any of the aspects, the component iii polypeptide or component iv polypeptide (e.g., of the reader CAR system) as described herein comprises SEQ ID NOs: 96, 97, 99, 54, and 99, or SEQ ID NOs: 96, 97, 54, and 103, or an amino acid sequence that is at least 95% identical to a sequence comprising SEQ ID NOs: 96, 97, 54, and 99, or SEQ ID NOs: 96, 97, 54, and 103, that maintains the same functions as SEQ ID NOs: 96, 97, 54, and 99 or 103.

[0684] In some embodiments of any of the aspects, the component iii polypeptide or component iv polypeptide (e.g., of the reader CAR system) as described herein is encoded by a nucleic acid sequence comprising SEQ ID NOs: 72, 73, 21, and 75, or SEQ ID NOs: 72, 73, 21, and 79, or a sequence that is at least 70%, at least 75%, at least 80%, at least 85%, at least 90%, at least 90%, at least 91%, at least 92%, at least 93%, at least 94%, at least 95%, at least 96%, at least 97%, at least 98%, or at least 99% identical to a sequence comprising SEQ ID NOs: 72, 73, 21, and 75, or SEQ ID NOs: 72, 73, 21, and 79, that maintains the same function or a codon-optimized version thereof. In some embodiments of any of the aspects, the component iii polypeptide or component iv polypeptide (e.g., of the reader CAR system) as described herein is encoded by a nucleic acid sequence comprising SEQ ID NOs: 72, 73, 21, and 75, or SEQ ID NOs: 72, 73, 21, and 79, or a sequence that is at least 95% identical to a sequence comprising SEQ ID NOs: 72, 73, 21, and 75, or SEQ ID NOs: 72, 73, 21, and 79, that maintains the same function or a codon-optimized version thereof.

[0685] In some embodiments of any of the aspects, the extracellular domain (e.g., of the second reader CAR system polypeptide) comprises the extracellular domain of DAP10. In some embodiments of any of the aspects, the extracellular domain (e.g., of the second reader CAR system polypeptide) is another extracellular domain as described herein. In some embodiments of any of the aspects, the second reader CAR system polypeptide does not comprise an extracellular binding domain.

[0686] In some embodiments of any of the aspects, the transmembrane domain is located between the extracellular domain and the at least one intracellular signaling domain. The transmembrane domain of the second reader CAR polypeptide can be any known transmembrane domain. In one embodiment, the transmembrane domain of the second reader CAR polypeptide comprises the transmembrane domain of CD8.

[0687] In some embodiments of any of the aspects, the second reader CAR polypeptide comprises 1, 2, 3, 4, 5, or more intracellular signaling domains. In embodiments comprising multiple intracellular signaling domains, the multiple repressible proteases can be different individual intracellular signaling domains or multiple copies of the same intracellular signaling domain, or a combination of the foregoing. In some embodiments of any of the aspects, the intracellular signaling domain (e.g., of the second reader CAR polypeptide) comprises at least one intracellular signaling domain selected from the group consisting of: TCRC; FcRy; FcRp; CD3zeta; CD3y; CD35; CD3s; CD3C; CD22; CD79a; CD79b; CD66d; CARD11; CD2; CD7; CD27; CD28; CD30; CD40; CD54 (ICAM); CD83; CD134 (OX40); CD137 (4-1BB); CD150 (SLAMF1); CD152 (CTLA4); CD223 (LAG3); CD270 (HVEM); CD273 (PD-L2); CD274 (PD-Ll); CD278 (ICOS); DAP10; LAT; KD2C SLP76; TRIM; ZAP70; and 41BB. In some embodiments of any of the aspects, the second reader CAR polypeptide comprises the intracellular signaling domain of 4-1BB and/or CD3zeta.

[0688] In some embodiments of any of the aspects, the second reader CAR polypeptide further comprises at least one detectable marker as described further herein. In some embodiments of any of the aspects, the detectable marker (e.g., of the second reader CAR polypeptide) is located at the C-terminal end of the polypeptide. In some embodiments of any of the aspects, the detectable marker (e.g., of the second reader CAR polypeptide) is selected from GFP, V5, HA1, Myc, VSV-G, HSV, FLAG, HIS, AU1, mCherry, and biotin.

[0689] In one aspect, described herein is a reader CAR system comprising the first and second reader polypeptides as described herein. Accordingly, the reader CAR system comprises: (a) a first polypeptide comprising: (i) an extracellular binding domain; (ii) a transmembrane domain; (iii) at least one intracellular signaling domain; and (iv) a reader domain; and (b) a second polypeptide comprising: (i) an extracellular domain; (ii) a transmembrane domain; (iii) a repressible protease; and (iv) at least one intracellular signaling domain; see e.g., Tables 5 and 9.

[0690] In some embodiments of any of the aspects, the second polypeptide (e.g., of the reader CAR system) specifically binds to the first polypeptide (e.g., of the reader CAR system) in the presence of protease inhibitor specific for both the reader domain of the first reader CAR polypeptide and the repressible protease of the second reader CAR polypeptide. In some embodiments of any of the aspects, the second polypeptide (e.g., of the reader CAR system) does not bind to the first polypeptide (e.g., of the reader CAR system) in the absence of the specific protease inhibitor. In some embodiments of any of the aspects, the reader CAR system is active (e.g., results in intracellular signaling when the extracellular binding domain binds its specific antigen) in the presence of the specific protease inhibitor. In some embodiments of any of the aspects, the reader CAR system is inactive (e.g., does not result in intracellular signaling) in the absence of the specific protease inhibitor, even when the extracellular binding domain binds its specific antigen or in the presence of another protease inhibitor that does not bind to the reader domain.

[0691] As a non-limiting example, grazoprevir in combination with the second reader CAR polypeptide can bind to a first reader CAR polypeptide comprising a GNCR reader domain, but not to a first reader CAR polypeptide comprising a DNCR reader domain. As another non-limiting example, danoprevir in combination with the second reader CAR polypeptide can bind to a first reader CAR polypeptide comprising a DNCR reader domain, but not to a first reader CAR polypeptide comprising a GNCR reader domain.

[0692] As such, in one aspect described herein is a reader CAR system (i.e., a multi-component reader CAR system) comprising multiple (e.g., 2, 3, 4, 5, or more) first reader CAR polypeptides, each comprising a different reader domain, and a second reader CAR polypeptide that can bind to each first reader CAR polypeptide depending on the presence of protease inhibitor specific to each reader domain. Accordingly, a three-component reader CAR system can comprise: (a) a first polypeptide comprising: (i) a first extracellular binding domain; (ii) a transmembrane domain; (iii) at least one intracellular signaling domain; and (iv) a first reader domain; (b) a second polypeptide comprising: (i) a second extracellular binding domain; (ii) a transmembrane domain; (iii) at least one intracellular signaling domain; and (iv) a second reader domain; and (c) a third polypeptide comprising: (i) an extracellular domain; (ii) a transmembrane domain; (iii) a repressible protease; and (iv) at least one intracellular signaling domain. In some embodiments of any of the aspects, the first and second reader domains can comprise any different reader domains that are responsive to different protease inhibitors. As a non-limiting example, the first reader domain can comprise DNCR and the second reader domain can comprise GNCR.

[0693] In some embodiments of any of the aspects, the extracellular binding domain of the first reader CAR polypeptide (e.g., of the three-component reader CAR system) binds to a tumor antigen that is different than the tumor antigen that binds to the extracellular binding domain of the second reader CAR polypeptide (e.g., of the three-component reader CAR system). Accordingly, the activity of the system and the antigen against which the system is directed depends on which protease inhibitor is present.

[0694] In some embodiments of any of the aspects, the three-component reader CAR system is active against the antigen of the first extracellular binding domain (e.g., results in intracellular signaling) in the presence of the protease inhibitor specific for the first reader domain. In some embodiments of any of the aspects, the three-component reader CAR system is active against the antigen of the second extracellular binding domain (e.g., results in intracellular signaling) in the presence of the protease inhibitor specific for the second reader domain. In some embodiments of any of the aspects, the three-component reader CAR system is active against the antigen of both the first and second extracellular binding domains (e.g., results in intracellular signaling) in the presence of the protease inhibitors specific for the first and second reader domains.

[0695] In some embodiments of any of the aspects, the first reader CAR polypeptide does not comprise an intracellular signalling domain. Accordingly, the reader CAR system can comprise: (a) a first polypeptide comprising: (i) an extracellular binding domain; (ii) a transmembrane domain; and (iii) a reader domain; and (b) a second polypeptide comprising: (i) an extracellular domain; (ii) a transmembrane domain; (iii) a repressible protease; and (iv) at least one intracellular signaling domain.

[0696] In some embodiments of any of the aspects, the second reader CAR polypeptide does not comprise an extracellular domain or a transmembrane domain, and it is a cytoplasmic protein. Accordingly, the reader CAR system can comprise: (a) a first polypeptide comprising: (i) an extracellular binding domain; (ii) a transmembrane domain; (iii) at least one intracellular signaling domain; and (iv) a reader domain; and (b) a second polypeptide comprising: (i) a repressible protease; and (ii) at least one intracellular signaling domain.

[0697] In some embodiments of any of the aspects, a specific genotype of NS3 repressible protease is paired with a specific reader domain (see e.g., FIG. 11B-11C). In one embodiment, a reader CAR system comprises a first polypeptide comprising a DNCR domain (e.g., SEQ ID NO: 77, 101) and a second polypeptide comprising NS3 genotype 1A (e.g., SEQ ID NO: 79, 103); see e.g., FIG. 11B, Table 8, and SEQ ID NO: 66, 67, 89, and 91. In one embodiment, a reader CAR system comprises a first polypeptide comprising a DNCR domain (e.g., SEQ ID NO: 77, 101) and a second polypeptide comprising NS3 genotype 1B (e.g., SEQ ID NO: 75, 99); see e.g., FIG. 11C, Table 8, and SEQ ID NO: 125 and 127. In one embodiment, a reader CAR system comprises a first polypeptide comprising a GNCR domain (e.g., SEQ ID NO: 81, 105) and a second polypeptide comprising NS3 genotype 1A (e.g., SEQ ID NO: 79, 103); see e.g., FIG. 11B, Table 9, and SEQ ID NO: 58, 69, 92, and 93. In one embodiment, a reader CAR system comprises a first polypeptide comprising a GNCR domain (e.g., SEQ ID NO: 81, 105) and a second polypeptide comprising NS3 genotype 1B (e.g., SEQ ID NO: 75, 99); see e.g., FIG. 11C, Table 9, and SEQ ID NO: 126 and 128.

[0698] In some embodiments of any of the aspects, a first reader CAR polypeptide comprises a reader domain comprising SEQ ID NO: 101 or SEQ ID NO: 105 or an amino acid sequence that is at least 70%, at least 75%, at least 80%, at least 85%, at least 90%, at least 90%, at least 91%, at least 92%, at least 93%, at least 94%, at least 95%, at least 96%, at least 97%, at least 98%, or at least 99% identical to the sequence of SEQ ID NOs: 101 or 105 that maintains the same function; and a second reader CAR polypeptide comprises a repressible protease comprising SEQ ID NO: 99 or 103 or an amino acid sequence that is at least 70%, at least 75%, at least 80%, at least 85%, at least 90%, at least 90%, at least 91%, at least 92%, at least 93%, at least 94%, at least 95%, at least 96%, at least 97%, at least 98%, or at least 99% identical to the sequence of SEQ ID NOs: 99 or 103 that maintains the same function.

[0699] In some embodiments of any of the aspects, a first reader CAR polypeptide comprises a reader domain encoded by a nucleic acid sequence comprising SEQ ID NOs: 77 or 81, or a sequence that is at least 70%, at least 75%, at least 80%, at least 85%, at least 90%, at least 90%, at least 91%, at least 92%, at least 93%, at least 94%, at least 95%, at least 96%, at least 97%, at least 98%, or at least 99% identical to SEQ ID NOs: 77 or 81 that maintains the same function or a codon-optimized version thereof; and a second reader CAR polypeptide comprises a repressible protease encoded by a nucleic acid sequence comprising SEQ ID NOs: 75 or 79, or a sequence that is at least 70%, at least 75%, at least 80%, at least 85%, at least 90%, at least 90%, at least 91%, at least 92%, at least 93%, at least 94%, at least 95%, at least 96%, at least 97%, at least 98%, or at least 99% identical to SEQ ID NOs: 75 or 79 that maintains the same function or a codon-optimized version thereof.

[0700] In some embodiments of any of the aspects, one polypeptide of the reader CAR system comprises a reader domain, and the other polypeptide of the reader CAR system comprises a repressible protease that binds to the reader domain, in the presence of a specific protease inhibitor. In some embodiments of any of the aspects, one polypeptide of the reader CAR system comprises an intracellular signaling domain, and the other polypeptide of the reader CAR system comprises an intracellular signaling domain that is a co-stimulatory domain. In some embodiments of any of the aspects, one polypeptide of the reader CAR system comprises an extracellular binding domain, and the other polypeptide of the reader CAR system comprises an extracellular domain (e.g., extracellular domain of DAP10) but does not comprise an extracellular binding domain. The reader CAR system can comprise any combination and assortment of reader domain, repressible protease, extracellular domain, signaling domain, and co-stimulatory domain between the two polypeptides (see e.g., Table 11 for non-limiting examples).

[0701] In some embodiments of any of the aspects, the first polypeptide (e.g., of the reader CAR system) comprises a co-stimulatory signaling domain. In some embodiments of any of the aspects, the co-stimulatory signaling domain of the first polypeptide (e.g., of the reader CAR system) comprises the co-stimulatory signaling domain of CD28. In some embodiments of any of the aspects, the co-stimulatory signaling domain of the first polypeptide (e.g., of the reader CAR system) comprises the co-stimulatory signaling domain of 4-1BB.

[0702] In some embodiments of any of the aspects, the second polypeptide (e.g., of the reader CAR system) comprises a signaling domain. In some embodiments of any of the aspects, the co-stimulatory signaling domain of the second polypeptide (e.g., of the reader CAR system) comprises the signaling domain of CD3zeta. In some embodiments of any of the aspects, the second polypeptide (e.g., of the reader CAR system) further comprises a co-stimulatory signaling domain. In some embodiments of any of the aspects, the co-stimulatory signaling domain of the second polypeptide (e.g., of the reader CAR system) comprises the co-stimulatory signaling domain of 4-1BB.

[0703] In some embodiments of any of the aspects, both polypeptides of the reader CAR system comprise an extracellular binding domain. In some embodiments of any of the aspects, the extracellular binding domain of the first reader CAR polypeptide binds to a tumor antigen that is the same as the tumor antigen that binds to the extracellular binding domain of the second reader CAR polypeptide. In some embodiments of any of the aspects, the extracellular binding domain of the first reader CAR polypeptide binds to a tumor antigen that is different than the tumor antigen that binds to the extracellular binding domain of the second reader CAR polypeptide. In some embodiments of any of the aspects, the extracellular binding domain of the first reader CAR polypeptide binds to a tumor antigen that is different than but found in close proximity to (e.g., on the same tumor cell) the tumor antigen that binds to the extracellular binding domain of the second reader CAR polypeptide. In some embodiments of any of the aspects, the reader CAR system is not functional (e.g., result in intracellular signaling) unless both antigens of the first and second reader CAR polypeptides are present in close proximity (e.g., on the same tumor cell).

TABLE 11
Exemplary combinations of domains in the first (1^{st}) and
second (2^{nd}) polypeptides of the reader CAR system.

| | EBD | Read | Pro. | CD3z | CD28 | 41BB |
|---|---|---|---|---|---|---|
| 1st | x | x | | | x | |
| 2nd | | | x | x | | |
| 1st | x | x | | | x | x |
| 2nd | | | x | x | | |
| 1st | x | x | | | x | |
| 2nd | | | x | x | | x |
| 1st | x | x | | | x | x |
| 2nd | | | x | x | | x |
| 1st | x | | x | | x | |
| 2nd | | x | | x | | |
| 1st | x | | x | | x | x |
| 2nd | | x | | x | | |
| 1st | x | | x | | x | |
| 2nd | | x | | x | | x |
| 1st | x | | x | | x | x |
| 2nd | | x | | x | | x |
| 1st | | x | | | x | |
| 2nd | x | | x | x | | |
| 1st | | x | | | x | x |
| 2nd | x | | x | x | | |
| 1st | | x | | | x | |
| 2nd | x | | x | x | | x |
| 1st | | x | | | x | x |
| 2nd | x | | x | x | | x |
| 1st | | | x | | x | |
| 2nd | x | x | | x | | |
| 1st | | | x | | x | x |
| 2nd | x | x | | x | | |
| 1st | | | x | | x | |
| 2nd | x | x | | x | | x |
| 1st | | | x | | x | x |
| 2nd | x | x | | x | | x |
| 1st | x | x | | | x | |
| 2nd | x | | x | x | | |
| 1st | x | x | | | x | x |
| 2nd | x | | x | x | | |
| 1st | x | x | | | x | |
| 2nd | x | | x | x | | x |
| 1st | x | x | | | x | x |
| 2nd | x | | x | x | | x |
| 1st | x | | x | | x | |
| 2nd | x | x | | x | | |
| 1st | x | | x | | x | x |
| 2nd | x | x | | x | | |
| 1st | x | | x | | x | |
| 2nd | x | x | | x | | x |
| 1st | x | | x | | x | x |
| 2nd | x | x | | x | | x |
| 1st | x | x | | | | x |
| 2nd | | | x | x | x | |
| 1st | x | x | | x | x | |
| 2nd | | | x | | | x |
| 1st | x | x | | | | x |
| 2nd | | | x | x | x | x |
| 1st | x | x | | x | x | x |
| 2nd | | | x | | | x |
| 1st | x | | x | | | x |
| 2nd | | x | | x | x | |
| 1st | x | | x | x | x | |
| 2nd | | x | | | | x |
| 1st | x | | x | | | x |
| 2nd | | x | | x | x | x |
| 1st | x | | x | x | x | x |
| 2nd | | x | | | | x |
| 1st | | x | | | | x |
| 2nd | x | | x | x | x | |
| 1st | | x | | x | x | |
| 2nd | x | | x | | | x |
| 1st | | x | | | | x |
| 2nd | x | | x | x | x | x |
| 1st | | x | | x | x | x |
| 2nd | x | | x | | | x |
| 1st | | | x | | | x |
| 2nd | x | x | | x | x | |
| 1st | | | x | x | x | |
| 2nd | x | x | | | | x |
| 1st | | | x | | | x |
| 2nd | x | x | | x | x | x |
| 1st | | | x | x | x | x |
| 2nd | x | x | | | | x |
| 1st | x | x | | | | x |
| 2nd | x | | x | x | x | |
| 1st | x | x | | x | x | |
| 2nd | x | | x | | | x |
| 1st | x | x | | | | x |
| 2nd | x | | x | x | x | x |
| 1st | x | x | | x | x | x |
| 2nd | x | | x | | | x |
| 1st | x | | x | | | x |
| 2nd | x | x | | x | x | |
| 1st | x | | x | x | x | |
| 2nd | x | x | | | | x |
| 1st | x | | x | | | x |
| 2nd | x | x | | x | x | x |
| 1st | x | | x | x | x | x |
| 2nd | x | x | | | | x |
| 1st | x | x | | | | |
| 2nd | | | x | x | | |
| 1st | x | x | | | | |
| 2nd | | | x | x | x | |
| 1st | x | x | | | | |
| 2nd | | | x | x | | x |
| 1st | x | x | | | | |
| 2nd | | | x | x | x | x |
| 1st | x | | x | | | |
| 2nd | | x | | x | | |
| 1st | x | | x | | | |
| 2nd | | x | | x | x | |
| 1st | x | | x | | | |
| 2nd | | x | | x | | x |
| 1st | x | | x | | | |
| 2nd | | x | | x | x | x |

“EBD” indicates extracellular binding domain; where an EBD is not indicated, then an extracellular domain (e.g., DAP10 extracellular domain) can be present or the polypeptide can be a cytosolic protein.
“Read” indicates the reader domain.
“Pro.” indicates the repressible protease. The domains shown in Table 11 are not necessarily shown in sequential order. Each polypeptide in Table 11 can further comprise a transmembrane domain.

[0704] In some embodiments of any of the aspects, the first polypeptide and second polypeptide (e.g., of the reader CAR system) are in the same contiguous molecule. In some embodiments of any of the aspects, the first polypeptide (e.g., of the reader CAR system) is N-terminal of the second polypeptide. In some embodiments of any of the aspects, the second polypeptide (e.g., of the reader CAR system) is N-terminal of the first polypeptide.

[0705] In some embodiments of any of the aspects, the first polypeptide and second polypeptide (e.g., of the reader CAR system) flank a self-cleaving peptide domain. In some embodiments of any of the aspects, the self-cleaving peptide is T2A, P2A, or another self-cleaving peptide as described herein. The self-cleaving peptide allows the nucleic acids of the first polypeptide and second polypeptide (e.g., of the reader CAR system) to be present in the same vector, but after translation the self-cleaving peptide cleaves the translated polypeptide into two separate polypeptides.

[0706] In some embodiments of any of the aspects, the reader CAR polypeptide system comprises SEQ ID NO: 90, 91, 92, 93, 127, 128, or an amino acid sequence that is at least 70%, at least 75%, at least 80%, at least 85%, at least 90%, at least 90%, at least 91%, at least 92%, at least 93%, at least 94%, at least 95%, at least 96%, at least 97%, at least 98%, or at least 99% identical to the sequence of one of SEQ ID NOs: 89, 91, 92, 93, 127, or 128 that maintains the same functions as SEQ ID NOs: 90, 91, 92, 93, 127, or 128 (e.g., target cell binding, CD3zeta signaling, etc.). In some embodiments of any of the aspects, the reader CAR polypeptide system comprises SEQ ID NOs: 89, 91, 92, 93, 127, 128, or an amino acid sequence that is at least 95% identical to the sequence of one of SEQ ID NOs: 90, 91, 92, 93, 127, or 128 that maintains the same function.

[0707] In some embodiments of any of the aspects, the reader CAR polypeptide system is encoded by a nucleic acid sequence comprising SEQ ID NOs: 66, 67, 68, 69, 125, or 126 or a sequence that is at least 70%, at least 75%, at least 80%, at least 85%, at least 90%, at least 90%, at least 91%, at least 92%, at least 93%, at least 94%, at least 95%, at least 96%, at least 97%, at least 98%, or at least 99% identical to one of SEQ ID NOs: 66-69 or 125-126 that maintains the same function or a codon-optimized version of SEQ ID NOs: 66-69 or 125-126. In some embodiments of any of the aspects, the reader CAR polypeptide system is encoded by a nucleic acid sequence comprising SEQ ID NOs: 66, 67, 68, 69, 125, or 126 or a sequence that is at least 95% identical to one of SEQ ID NOs: 66-69 or 125-126 that maintains the same function.

[0708] In some embodiments, the first polypeptide of the reader CAR system is encoded by a nucleic acid sequence comprising nt 1-1881 of SEQ ID NO: 66 or a sequence that is at least 95% identical that maintains the same function. In some embodiments, the second polypeptide of the reader CAR system is encoded by a nucleic acid sequence comprising nt 1945-3942 of SEQ ID NO: 66 or a sequence that is at least 95% identical that maintains the same function.

[0709] In some embodiments, the first polypeptide of the reader CAR system is encoded by a nucleic acid sequence comprising nt 1-1881 of SEQ ID NO: 125 or a sequence that is at least 95% identical that maintains the same function. In some embodiments, the second polypeptide of the reader CAR system is encoded by a nucleic acid sequence comprising nt 1945-3915 of SEQ ID NO: 125 or a sequence that is at least 95% identical that maintains the same function.

[0710] In some embodiments, the first polypeptide of the reader CAR system is encoded by a nucleic acid sequence comprising nt 1-2007 of SEQ ID NO: 67 or a sequence that is at least 95% identical that maintains the same function. In some embodiments, the second polypeptide of the reader CAR system is encoded by a nucleic acid sequence comprising nt 2071-4071 of SEQ ID NO: 67 or a sequence that is at least 95% identical that maintains the same function.

[0711] In some embodiments, the first polypeptide of the reader CAR system is encoded by a nucleic acid sequence comprising nt 1-1893 of SEQ ID NO: 68 or a sequence that is at least 95% identical that maintains the same function. In some embodiments, the second polypeptide of the reader CAR system is encoded by a nucleic acid sequence comprising nt 1957-3954 of SEQ ID NO: 68 or a sequence that is at least 95% identical that maintains the same function.

[0712] In some embodiments, the first polypeptide of the reader CAR system is encoded by a nucleic acid sequence comprising nt 1-1893 of SEQ ID NO: 126 or a sequence that is at least 95% identical that maintains the same function. In some embodiments, the second polypeptide of the reader CAR system is encoded by a nucleic acid sequence comprising nt 1957-3927 of SEQ ID NO: 126 or a sequence that is at least 95% identical that maintains the same function.

[0713] In some embodiments, the first polypeptide of the reader CAR system is encoded by a nucleic acid sequence comprising nt 1-2019 of SEQ ID NO: 69 or a sequence that is at least 95% identical that maintains the same function. In some embodiments, the second polypeptide of the reader CAR system is encoded by a nucleic acid sequence comprising nt 2083-4083 of SEQ ID NO: 69 or a sequence that is at least 95% identical that maintains the same function.

[0714] In some embodiments, the first polypeptide of the reader CAR system comprises aa 1-626 of SEQ ID NO: 90 or a sequence that is at least 95% identical that maintains the same function. In some embodiments, the second polypeptide of the reader CAR system comprises aa 648-1313 of SEQ ID NO: 90 or a sequence that is at least 95% identical that maintains the same function.

[0715] In some embodiments, the first polypeptide of the reader CAR system comprises aa 1-626 of SEQ ID NO: 127 or a sequence that is at least 95% identical that maintains the same function. In some embodiments, the second polypeptide of the reader CAR system comprises aa 648-1303 of SEQ ID NO: 127 or a sequence that is at least 95% identical that maintains the same function.

[0716] In some embodiments, the first polypeptide of the reader CAR system comprises aa 1-668 of SEQ ID NO: 91 or a sequence that is at least 95% identical that maintains the same function. In some embodiments, the second polypeptide of the reader CAR system comprises aa 690-1355 of SEQ ID NO: 91 or a sequence that is at least 95% identical that maintains the same function.

[0717] In some embodiments, the first polypeptide of the reader CAR system comprises aa 1-630 of SEQ ID NO: 92 or a sequence that is at least 95% identical that maintains the same function. In some embodiments, the second polypeptide of the reader CAR system comprises aa 652-1317 of SEQ ID NO: 92 or a sequence that is at least 95% identical that maintains the same function.

[0718] In some embodiments, the first polypeptide of the reader CAR system comprises aa 1-630 of SEQ ID NO: 128 or a sequence that is at least 95% identical that maintains the same function. In some embodiments, the second polypeptide of the reader CAR system comprises aa 652-1307 of SEQ ID NO: 128 or a sequence that is at least 95% identical that maintains the same function.

[0719] In some embodiments, the first polypeptide of the reader CAR system comprises aa 1-672 of SEQ ID NO: 93 or a sequence that is at least 95% identical that maintains the same function. In some embodiments, the second polypeptide of the reader CAR system comprises aa 694-1359 of SEQ ID NO: 93 or a sequence that is at least 95% identical that maintains the same function.

[0720] Tables 5 and 9 shows the locations of specific domains in exemplary Reader CAR sequences. The nucleic acid numbers are shown first, followed by the amino acid residues.

TABLE 5
Reader CAR Sequences (DNCR)

| | DNCR CAR ciii (SEQ | DNCR CAR NS31b (SEQ | DNCR CAR diii (SEQ |
|---|---|---|---|
| Element (SEQ ID NOs) | ID NO: 66, 90) | ID NO: 125, 127) | ID NO: 67, 91) |
| CD8a leading peptide (7, 40) | 1-63, 1-20 | 1-63, 1-20 | 1-63, 1-20 |
| CD19 scFv (70, 94) | 64-789, 21-262 | 64-789, 21-262 | 64-789, 21-262 |
| V5 tag (9, 42) | 790-831, 263-276 | 790-831, 263-276 | 790-831, 263-276 |
| CDS hinge (10, 43) | 844-978, 281-325 | 844-978, 281-325 | 844-978, 281-325 |
| CD28 transmembrane (11, 44) | 979-1059, 326-352 | 979-1059, 326-352 | 979-1059, 326-352 |
| CD28 ICD (19, 52) | 1060-1182, 353-393 | 1060-1182, 353-393 | 1060-1182, 353-393 |
| 41BB ICD (20, 53) | | | 1183-1308, 394-435 |
| Linker (80, 104) | 1183-1194, 394-397 | 1183-1194, 394-397 | 1309-1320, 436-439 |
| DNCR2 (77, 101) | 1195-1881, 398-626 | 1195-1881, 398-626 | 1321-2007, 440-668 |
| GNCR1 (81, 105) | | | |
| T2A (78, 102) | 1882-1944, 627-647 | 1882-1944, 627-647 | 2008-2070, 669-689 |
| DAP10 ectodomain (72, 96) | 1945-2088, 648-695 | 1945-2088, 648-695 | 2071-2214, 690-737 |
| CD8 transmembrane (73, 97) | 2089-2151, 696-716 | 2089-2151, 696-716 | 2215-2277, 738-758 |
| 41BB ICD (20, 53) | 2152-2277, 717-758 | 2152-2277, 717-758 | 2278-2403, 759-800 |
| NS4A (15, 48) | 2278-2316, 759-771 | 2278-2316, 759-771 | 2404-2442, 801-813 |
| NS31a (79, 103) | 2329-2895, 776-964 | | 2455-3021, 818-1006 |
| NS31b (75, 99) | | 2329-2865, 776-954 | |
| CD3z ICD (21, 54) | 2896-3231, 965-1076 | 2866-3201, 955-1066 | 3022-3357, 1007-1118 |
| mCherry (76, 100) | 3235-3942, 1078-1313 | 3205-3915, 1068-1303 | 3361-4068, 1120-1355 |

TABLE 9
Reader CAR Sequences (GNCR)

| | GNCR CAR ciii (SEQ | GNCR CAR NS31b (SEQ | GNCR CAR diii (SEQ |
|---|---|---|---|
| Element (SEQ ID NOs) | ID NO: 68, 92) | ID NO: 126, 128) | ID NO: 69, 93) |
| CD8a leading peptide (7, 40) | 1-63, 1-20 | 1-63, 1-20 | 1-63, 1-20 |
| CD19 scFv (70, 94) | 64-789, 21-262 | 64-789, 21-262 | 64-789, 21-262 |
| V5 tag (9, 42) | 790-831, 263-276 | 790-831, 263-276 | 790-831, 263-276 |
| CDS hinge (10, 43) | 844-978, 281-325 | 844-978, 281-325 | 844-978, 281-325 |
| CD28 transmembrane (11, 44) | 979-1059, 326-352 | 979-1059, 326-352 | 979-1059, 326-352 |
| CD28 ICD (19, 52) | 1060-1182, 353-393 | 1060-1182, 353-393 | 1060-1182, 353-393 |
| 41BB ICD (20, 53) | | | 1183-1308, 394-435 |
| Linker (80, 104) | 1183-1194, 394-397 | 1183-1194, 394-397 | 1309-1320, 436-439 |
| DNCR2 (77, 101) | | | |
| GNCR1 (81, 105) | 1195-1893, 398-630 | 1195-1893, 398-630 | 1321-2019, 440-672 |
| T2A (78, 102) | 1894-1956, 631-651 | 1894-1956, 631-651 | 2020-2082, 673-693 |
| DAP10 ectodomain (72, 96) | 1957-2100, 652-699 | 1957-2100, 652-699 | 2083-2226, 694-741 |
| CD8 transmembrane (73, 97) | 2101-2163, 700-720 | 2101-2163, 700-720 | 2227-2289, 742-762 |
| 41BB ICD (20, 53) | 2164-22789, 721-762 | 2164-22789, 721-762 | 2290-2415, 763-804 |
| NS4A (15, 48) | 2290-2328, 763-775 | 2290-2328, 763-775 | 2416-2454, 805-817 |
| NS31a (79, 103) | 2341-2907, 780-968 | | 2467-3033, 822-1010 |
| NS31b (75, 99) | | 2341-2877, 780-958 | |
| CD3z ICD (21, 54) | 2908-3243, 969-1080 | 2878-3213, 959-1070 | 3034-3369, 1011-1122 |
| mCherry (76, 100) | 3247-3954, 1082-1317 | 3217-3927, 1072-1307 | 3373-4080, 1124-1359 |

[0721] In multiple aspects, described herein are polynucleotides that encode for CAR polypeptides or CAR polypeptide systems. In some embodiments of any of the aspects, a CAR polynucleotide comprises SEQ ID NOs: 1-6, 60-69, 106-113, 125-126 (see e.g., Table 20), or a sequence that is at least 70%, at least 75%, at least 80%, at least 85%, at least 90%, at least 90%, at least 91%, at least 92%, at least 93%, at least 94%, at least 95%, at least 96%, at least 97%, at least 98%, or at least 99% identical to the sequence of SEQ ID NOs: 1-6, 60-69, 106-113, 125-126, that as a polypeptide maintains the same functions as SEQ ID NOs: 1-6, 60-69, 106-113, 125-126 (e.g., antigen-binding and intracellular signaling).

[0722] In some embodiments, the CAR polynucleotide is a codon-optimized version of SEQ ID NOs: 1-6, 60-69, 106-113, 125-126. In some embodiments of any of the aspects, the vector or nucleic acid described herein is codon-optimized, e.g., the native or wild-type sequence of the nucleic acid sequence has been altered or engineered to include alternative codons such that altered or engineered nucleic acid encodes the same polypeptide expression product as the native/wild-type sequence, but will be transcribed and/or translated at an improved efficiency in a desired expression system. In some embodiments of any of the aspects, the expression system is an organism other than the source of the native/wild-type sequence (or a cell obtained from such organism). In some embodiments of any of the aspects, the vector and/or nucleic acid sequence described herein is codon-optimized for expression in a mammal or mammalian cell, e.g., a mouse, a murine cell, or a human cell. In some embodiments of any of the aspects, the vector and/or nucleic acid sequence described herein is codon-optimized for expression in a human cell. In some embodiments of any of the aspects, the vector and/or nucleic acid sequence described herein is codon-optimized for expression in a yeast or yeast cell. In some embodiments of any of the aspects, the vector and/or nucleic acid sequence described herein is codon-optimized for expression in a bacterial cell. In some embodiments of any of the aspects, the vector and/or nucleic acid sequence described herein is codon-optimized for expression in an E. coli cell.

[0723] In some embodiments, one or more of the genes described herein is expressed in a recombinant expression vector or plasmid. As used herein, the term “vector” refers to a polynucleotide sequence suitable for transferring transgenes into a host cell. The term “vector” includes plasmids, mini-chromosomes, phage, naked DNA and the like. See, for example, U.S. Pat. Nos. 4,980,285; 5,631,150; 5,707,828; 5,759,828; 5,888,783 and, 5,919,670, and, Sambrook et al, Molecular Cloning: A Laboratory Manual, 2nd Ed., Cold Spring Harbor Press (1989). One type of vector is a “plasmid,” which refers to a circular double stranded DNA loop into which additional DNA segments are ligated. Another type of vector is a viral vector, wherein additional DNA segments are ligated into the viral genome. Certain vectors are capable of autonomous replication in a host cell into which they are introduced (e.g., bacterial vectors having a bacterial origin of replication and episomal mammalian vectors). Moreover, certain vectors are capable of directing the expression of genes to which they are operatively linked. Such vectors are referred to herein as “expression vectors”. In general, expression vectors of utility in recombinant DNA techniques are often in the form of plasmids. In the present specification, “plasmid” and “vector” is used interchangeably as the plasmid is the most commonly used form of vector. However, the invention is intended to include such other forms of expression vectors, such as viral vectors (e.g., replication defective retroviruses, adenoviruses and adeno-associated viruses), which serve equivalent functions.

[0724] A cloning vector is one which is able to replicate autonomously or integrated in the genome in a host cell, and which is further characterized by one or more endonuclease restriction sites at which the vector may be cut in a determinable fashion and into which a desired DNA sequence can be ligated such that the new recombinant vector retains its ability to replicate in the host cell. In the case of plasmids, replication of the desired sequence can occur many times as the plasmid increases in copy number within the host cell such as a host bacterium or just a single time per host before the host reproduces by mitosis. In the case of phage, replication can occur actively during a lytic phase or passively during a lysogenic phase.

[0725] An expression vector is one into which a desired DNA sequence can be inserted by restriction and ligation such that it is operably joined to regulatory sequences and can be expressed as an RNA transcript. Vectors can further contain one or more marker sequences suitable for use in the identification of cells which have or have not been transformed or transformed or transfected with the vector. Markers include, for example, genes encoding proteins which increase or decrease either resistance or sensitivity to antibiotics or other compounds, genes which encode enzymes whose activities are detectable by standard assays known in the art (e.g., β-galactosidase, luciferase or alkaline phosphatase), and genes which visibly affect the phenotype of transformed or transfected cells, hosts, colonies or plaques (e.g., green fluorescent protein). In certain embodiments, the vectors used herein are capable of autonomous replication and expression of the structural gene products present in the DNA segments to which they are operably joined.

[0726] As used herein, a coding sequence and regulatory sequences are said to be “operably” joined when they are covalently linked in such a way as to place the expression or transcription of the coding sequence under the influence or control of the regulatory sequences. If it is desired that the coding sequences be translated into a functional protein, two DNA sequences are said to be operably joined if induction of a promoter in the 5′ regulatory sequences results in the transcription of the coding sequence and if the nature of the linkage between the two DNA sequences does not (1) result in the introduction of a frame-shift mutation, (2) interfere with the ability of the promoter region to direct the transcription of the coding sequences, or (3) interfere with the ability of the corresponding RNA transcript to be translated into a protein. Thus, a promoter region would be operably joined to a coding sequence if the promoter region were capable of effecting transcription of that DNA sequence such that the resulting transcript can be translated into the desired protein or polypeptide.

[0727] When the nucleic acid molecule that encodes any of the polypeptides described herein is expressed in a cell, a variety of transcription control sequences (e.g., promoter/enhancer sequences) can be used to direct its expression. The promoter can be a native promoter, i.e., the promoter of the gene in its endogenous context, which provides normal regulation of expression of the gene. In some embodiments the promoter can be constitutive, i.e., the promoter is unregulated allowing for continual transcription of its associated gene. A variety of conditional promoters also can be used, such as promoters controlled by the presence or absence of a molecule.

[0728] The precise nature of the regulatory sequences needed for gene expression can vary between species or cell types, but in general can include, as necessary, 5′ non-transcribed and 5′ non-translated sequences involved with the initiation of transcription and translation respectively, such as a TATA box, capping sequence, CAAT sequence, and the like. In particular, such 5′ non-transcribed regulatory sequences will include a promoter region which includes a promoter sequence for transcriptional control of the operably joined gene. Regulatory sequences can also include enhancer sequences or upstream activator sequences as desired. The vectors of the invention may optionally include 5′ leader or signal sequences. The choice and design of an appropriate vector is within the ability and discretion of one of ordinary skill in the art.

[0729] In some embodiments of any of the aspects, the promoter is a eukaryotic or human constitutive promoter, including but not limited to EF-1alpha, SFFV, CMV, and the like. In some embodiments of any of the aspects, the vector (e.g., SEQ ID NOs: 236-237, 250-253) comprises a human elongation factor-1 alpha (EF-1alpha) promoter (e.g., SEQ ID NO: 267), which is a constitutive promoter of human origin that can be used to drive ectopic gene expression in various in vitro and in vivo contexts. In some embodiments of any of the aspects, the vector (e.g., SEQ ID NOs: 238-249, 254-261) comprises a silencing-prone spleen focus forming virus (SFFV) promoter (e.g., SEQ ID NO: 266), which can result in a higher level of constitutive transgene expression compared with CMV or EF1α promoters. In some embodiments of any of the aspects, the vector comprises a Kozak sequence (e.g., GCCGCCACC), which is a nucleic acid motif that functions as the protein translation initiation site in eukaryotic mRNA transcripts.

[0730] Expression vectors containing all the necessary elements for expression are commercially available and known to those skilled in the art. See, e.g., Sambrook et al., Molecular Cloning: A Laboratory Manual, Second Edition, Cold Spring Harbor Laboratory Press, 1989. Cells are genetically engineered by the introduction into the cells of heterologous DNA (RNA). That heterologous DNA (RNA) is placed under operable control of transcriptional elements to permit the expression of the heterologous DNA in the host cell.

[0731] In some embodiments of any of the aspects, a CAR vector comprises one of SEQ ID NOs: 236-261 (see e.g., Table 20) or a sequence that is at least 70%, at least 75%, at least 80%, at least 85%, at least 90%, at least 90%, at least 91%, at least 92%, at least 93%, at least 94%, at least 95%, at least 96%, at least 97%, at least 98%, or at least 99% identical to the sequence of one of SEQ ID NOs: 236-261, that maintains the same functions as one of SEQ ID NOs: 236-261 (e.g., lentivirus vector, CAR polypeptide expression).

[0732] In some embodiments, the vector is a pHR vector. In some embodiments, the vector is a lentiviral vector. The term “lentivirus” refers to a genus of the Retroviridae family. Lentiviruses are unique among the retroviruses in being able to infect non-dividing cells; they can deliver a significant amount of genetic information into the DNA of the host cell, so they are one of the most efficient methods of a gene delivery vector. HIV, SIV, and FIV are all examples of lentiviruses. The term “lentiviral vector” refers to a vector derived from at least a portion of a lentivirus genome, including especially a self-inactivating lentiviral vector as provided in Milone et al., Mol. Ther. 17(8): 1453-1464 (2009). Other examples of lentivirus vectors that may be used in the clinic, include but are not limited to, e.g., the LENTIVECTOR® gene delivery technology from Oxford BioMedica, the LENTIMAX™ vector system from Lentigen and the like. Nonclinical types of lentiviral vectors are also available and would be known to one skilled in the art.

[0733] In some embodiments of any of the aspects, the lentiviral vector comprises a central polypurine tract (cPPT; e.g., SEQ ID NO: 268). A central polypurine tract/central termination sequence creates a “DNA flap” that increases nuclear importation of the viral genome during target-cell infection. The cPPT/CTS element improves vector integration and transduction efficiency. In some embodiments of any of the aspects, the lentiviral vector comprises a woodchuck hepatitis virus posttranscriptional regulatory element (WPRE; e.g., SEQ ID NO: 269), which prevents poly(A) site read-through, promotes RNA processing and maturation, and increases nuclear export of RNA. In genomic transcripts, it enhances vector packaging and increases titer. In transduced target cells, the WPRE boosts transgene expression by facilitating mRNA transcript maturation.

[0734] Without limitations, the genes described herein can be included in one vector or separate vectors. For example, the first AND-gate CAR polypeptide gene and the second AND-gate CAR polypeptide gene can be included in the same vector; or the first OFF-switch CAR polypeptide gene and the second OFF-switch CAR polypeptide gene can be included in the same vector; or the first reader CAR polypeptide gene and the second reader CAR polypeptide gene can be included in the same vector.

[0735] In some embodiments, the ON-switch CAR polypeptide is included in a single vector. In some embodiments, the first AND-gate CAR polypeptide gene can be included in a first vector, and the second AND-gate CAR polypeptide gene can be included in a second vector. In some embodiments, the first OFF-switch CAR polypeptide gene can be included in a first vector, and the second OFF-switch CAR polypeptide gene can be included in a second vector. In some embodiments, the first reader CAR polypeptide gene can be included in a first vector, and the second reader CAR polypeptide gene can be included in a second vector.

[0736] In some embodiments, the vector comprises a selectable marker, e.g., for selectively amplifying the vector in bacteria. Non-limiting examples of selectable marker genes for use in bacteria include antibiotic resistance genes conferring resistance to ampicillin, tetracycline and kanamycin. The tetracycline (tet) and ampicillin (amp) resistance marker genes can be obtained from any of a number of commercially available vectors including pBR322 (available from New England BioLabs, Beverly, Mass., cat. no. 303-3s). The tet coding sequence is contained within nucleotides 86-476; the amp gene is contained within nucleotides 3295-4155. The nucleotide sequence of the kanamycin (kan) gene is available from vector pACYC 177, from New England BioLabs, Cat no. 401-L, GenBank accession No. X06402.

[0737] In some embodiments, one or more of the recombinantly expressed genes can be integrated into the genome of the cell.

[0738] A nucleic acid molecule that encodes the enzyme of the claimed invention can be introduced into a cell or cells using methods and techniques that are standard in the art. For example, nucleic acid molecules can be introduced by standard protocols such as transformation including chemical transformation and electroporation, transduction, particle bombardment, etc. Expressing the nucleic acid molecule encoding the enzymes of the claimed invention also may be accomplished by integrating the nucleic acid molecule into the genome.

TABLE 20
Exemplary CAR Polypeptide-Encoding Vectors

| | | Corresponding CAR Polynucleotide, |
|---|---|---|
| SEQ ID NO | Vector Name | Polypeptide, or System |
| 236 | pHS240-ANDgate-DD | AND-Gate CAR (e.g., SEQ ID NO: 6, 39) |
| 237 | pHS241-ANDgate-NS3 | AND-Gate CAR (e.g., SEQ ID NO: 5, 38) |
| 238 | pHS340-component c | OFF-Switch CAR (e.g., SEQ ID NO: 60, 84) |
| 239 | pHS341-component d | OFF-Switch CAR (e.g., SEQ ID NO: 61, 85) |
| 240 | pHS342-component i | OFF-Switch CAR (e.g., SEQ ID NO: 62, 86) |
| 241 | pHS343-component ii | OFF-Switch CAR (e.g., SEQ ID NO: 63, 87) |
| 242 | pHS344-component iii | OFF-Switch CAR (e.g., SEQ ID NO: 64, 88) |
| 243 | pHS345-component iv | OFF-Switch CAR (e.g., SEQ ID NO: 65, 89) |
| 244 | pHS367B-DNCR CAR tethered | Reader CAR (e.g., SEQ ID NO: 125, 127) |
| | ci - NS31b | |
| 245 | pHS367-DNCR CAR ciii | Reader CAR (e.g., SEQ ID NO: 66, 89) |
| | (pHS367-DNCR CAR tethered | |
| | ci - NS31a) | |
| 246 | pHS369-DNCR CAR diii | Reader CAR (e.g., SEQ ID NO: 67, 91) |
| | (pHS371 - GNCR CAR tethered | |
| | ci - NS31a) | |
| 247 | pHS371B - GNCR CAR tethered | Reader CAR (e.g., SEQ ID NO: 126, 128) |
| | ci - NS31b | |
| 248 | pHS371-GNCR CAR ciii | Reader CAR (e.g., SEQ ID NO: 68, 92) |
| 249 | pHS373-GNCR CAR diii | Reader CAR (e.g., SEQ ID NO: 69, 93) |
| 250 | pNW387-NS3CAR-V1 | ON-Switch CAR (e.g., SEQ ID NO: 1, 34) |
| 251 | pNW430-Traditional CAR | Traditional CAR (e.g., SEQ ID NO: 4, 37) |
| 252 | pNW431-NS3CAR-V2 | ON-Switch CAR (e.g., SEQ ID NO: 2, 35) |
| 253 | pNW432-NS3CAR-V3 | ON-Switch CAR (e.g., SEQ ID NO: 3, 36) |
| 254 | pNW549-OFFCAR-c + i | OFF-Switch CAR (e.g., SEQ ID NO: 106, 114) |
| 255 | pNW550-OFFCAR-c + ii | OFF-Switch CAR (e.g., SEQ ID NO: 107, 115) |
| 256 | pNW551-OFFCAR-c + iii | OFF-Switch CAR (e.g., SEQ ID NO: 108, 116) |
| 257 | pNW552-OFFCAR-c + iv | OFF-Switch CAR (e.g., SEQ ID NO: 109, 117) |
| 258 | pNW553-OFFCAR-d + i | OFF-Switch CAR (e.g., SEQ ID NO: 110, 118) |
| 259 | pNW554-OFFCAR-d + ii | OFF-Switch CAR (e.g., SEQ ID NO: 111, 119) |
| 260 | pNW555-OFFCAR-d + iii | OFF-Switch CAR (e.g., SEQ ID NO: 112, 120) |
| 261 | pNW556-OFFCAR-d + iv | OFF-Switch CAR (e.g., SEQ ID NO: 113, 121) |

[0739] In some embodiments of any of the aspects, a nucleic acid primer can be used to synthesize or sequence a CAR polynucleotide or CAR vector as described herein. In some embodiments of any of the aspects, the CAR primer comprises SEQ ID NOs: 27-33, 82-83, 213-235, 262-265 or a sequence that is at least 70%, at least 75%, at least 80%, at least 85%, at least 90%, at least 90%, at least 91%, at least 92%, at least 93%, at least 94%, at least 95%, at least 96%, at least 97%, at least 98%, or at least 99% identical to one of SEQ ID NOs: 27-33, 82-83, 213-235, 262-265 that maintains the same function.

TABLE 19
Exemplary Primers

| SEQ ID | | |
|---|---|---|
| NO | Name | Sequence |
| 27 | forward primer (e.g., for SEQ ID NO: 1-6) | ATGGCCTTACCAGTGACCG |
| 28 | primer P2R (e.g., for SEQ ID NO: 1-5) | TTAGCGAGGGGGCAGG |
| 29 | HS 401 R primer (e.g., for SEQ ID NO: 6) | CCGCTAACGCCGCAATCAGACTGATGCCGGAG |
| | | CGATAGGCTGCGAAGTCGCGTGG |
| 30 | HS 402 F primer (e.g., for SEQ ID NO: 6) | ATCAGTCTGATTGCGGCGTTAGCGG |
| 31 | HS 403 R primer (e.g., for SEQ ID NO: 5) | CTGCGCTCCTGCTGAACTTCACTCTAGCGTAAT |
| | | CGGGCACATCGTAGGGA |
| 32 | HS 404 F primer (e.g., for SEQ ID NO: 1-5) | AGAGTGAAGTTCAGCAGGAGCGCAG |
| 33 | HS 422 R primer (e.g., for SEQ ID NOs: | CCTGCAGGTCGACTCTAGAGTCGCGGCCGCAC |
| | 236-237, 250-253) | TAGTTTAGCGAGGGGGCAGGGCCTGCAT |
| 82 | HS 505 R primer (e.g., for SEQ ID NO: 60) | CCTGACCCGCTGAATTCGGTACCCCCGGAGCG |
| | | ATAGGCTGCGAAGTCGCGT |
| 83 | HS 506 F primer (e.g., for SEQ ID NO: 60, | GGGGGTACCGAATTCAGCGGGTCAGGC |
| | 61, 110, 111) | |
| 213 | 516F (e.g., for SEQ ID NO: 107, 111, 113) | GGTTCTGTTGTTATTGTTGGTAGAAT |
| 214 | HS519R (e.g., for SEQ ID NO: 108) | GGTAATAACCAGACTCAGCAGAAGC |
| 215 | HS520F (e.g., for SEQ ID NO: 108) | GCTTCTGCTGAGTCTGGTTATTACCGGTTCTGT |
| | | TGTTATTGTTGGTAGAA |
| 216 | HS511R (e.g., for SEQ ID NO: 108) | CTGCGCTCCTGCTGAACTTCACTCTAGACCGCA |
| | | TGGTAGTTTCCATAGAC |
| 217 | HS512F (e.g., for SEQ ID NO: 108) | AGAGTGAAGTTCAGCAGGAGCGCAG |
| 218 | HS521R (e.g., for SEQ ID NO: 109) | CTGCGCTCCTGCTGAACTTCACTCTGGTAATAA |
| | | CCAGACTCAGCAG |
| 219 | HS515R (e.g., for SEQ ID NO: 109) | ATTCTACCAACAATAACAACAGAACCGCGAGG |
| | | GGGCAGGGCCTGCATGTGA |
| 220 | HS517R (e.g., for SEQ ID NO: 109) | ATGTTATCCTCCTCGCCCTTGCTCACCATGCCA |
| | | GACCGCATGGTAGTTTCCATAGAC |
| 221 | HS518F (e.g., for SEQ ID NO: 109) | ATGGTGAGCAAGGGCGAGGAGGATAACAT |
| 222 | HS 505 R primer (e.g., for SEQ ID NO: 110) | GGAGCGATAGGCTGCGAAGTCGCGT |
| 223 | HS 507 R primer (e.g., for SEQ ID NO: | GCCTGACCCGCTGAATTCGGTACCCCCCAGTTC |
| | 110, 111) | ACATCCTCCTTCTTCTTCTTCT |
| 224 | HS570F (e.g. for SEQ ID NO: 125) | GGCTCAGGAAGCTCTTCCGACGAAG |
| 225 | HS571R (e.g. for SEQ ID NO: 125) | CTTCGTCGGAAGAGCTTCCTGAGCCGGAGCGA |
| | | TAGGCTGCGAAGTCGCGT |
| 226 | HS572R (e.g. for SEQ ID NO: 125) | ATGATTCAGCCAACCGGATGGATCA |
| 227 | HS573F (e.g. for SEQ ID NO: 125) | TGATCCATCCGGTTGGCTGAATCATGGCAGTG |
| | | GAGAGGGCAGAGGAAGTC |
| 228 | HS584R (e.g., for SEQ ID NO: 126) | GCTTCTCGATATCGCTTCCTGAGCCGGAGCGAT |
| | | AGGCTGCGAAGTCGCGT |
| 229 | HS575F (e.g. for SEQ ID NO: 126) | GGCTCAGGAAGCGATATCGAGAAGC |
| 230 | HS576R (e.g. for SEQ ID NO: 126) | GGACTTACAGCGTTCTTTTACCTCC |
| 231 | HS577F (e.g. for SEQ ID NO: 126) | GGAGGTAAAAGAACGCTGTAAGTCCGGCAGTG |
| | | GAGAGGGCAGAGGAAGTC |
| 232 | HS555F (e.g. for SEQ ID NO: 126) | GGCTGCGTGGTCATAGTGGGCAGGA |
| 233 | HS556R (e.g. for SEQ ID NO: 126) | CAGTTCACATCCTCCTTCTTCTTCT |
| 234 | HS580R (e.g. for SEQ ID NO: 126) | TCCTGCCCACTATGACCACGCAGCCCAGTTCA |
| | | CATCCTCCTTCTTCTTCT |
| 235 | HS557F (e.g. for SEQ ID NO: 126) | AGAGTGAAGTTCAGCAGGAGCGCAG |
| 262 | 1166 Seq F (e.g., for SEQ ID NOs: 236-261) | GCTTCCCGAGCTCTATAAAAGAGC |
| 263 | Gibson Forward (e.g., for SEQ ID NOs: | GATCTGGAGCTCTCGAGAATTCTCACGCGT |
| | 236-261) | |
| 264 | Gibson Reverse (e.g., for SEQ ID NOs: | CCTGCAGGTCGACTCTAGAGTCGCGGCCGC |
| | 236-261) | |
| 265 | 1167 Seq R (e.g., for SEQ ID NOs: | CCAGAGGTTGATTATCGATAAGC |
| | 236-261) | |

[0740] In one aspect, described herein is a cell or population thereof comprising the at least one CAR polypeptide, CAR system, CAR polynucleotide, or CAR vector as described herein (see e.g., Tables 1-5, 7-9, 20). In some embodiments of any of the aspects, the cell or population thereof can comprise any combination of CAR polypeptides or systems (see e.g., Table 12).

[0741] In one aspect, the invention provides a number of chimeric antigen receptors (CAR) comprising an antibody or antibody fragment engineered for enhanced binding to a tumor antigen. In one aspect, the invention provides a cell (e.g., T cell) engineered to express a CAR, wherein the CAR T cell (“CART”) exhibits an antitumor property. In one aspect a cell is transformed with the CAR and the CAR is expressed on the cell surface. In some embodiments, the cell (e.g., T cell) is transduced with a viral vector encoding a CAR. In some embodiments, the viral vector is a retroviral vector. In some embodiments, the viral vector is a lentiviral vector. In some such embodiments, the cell may stably express the CAR. In another embodiment, the cell (e.g., T cell) is transfected with a nucleic acid, e.g., mRNA, cDNA, DNA, encoding a CAR. In some such embodiments, the cell may transiently express the CAR.

[0742] In some embodiments of any of the aspects, the cell comprises an immune cell. In some embodiments of any of the aspects, the immune cell comprises a CD4+ T cell, a CD8+ T cell, a regulatory T cell (Treg), or a natural killer (NK) cell. In one embodiment, the cell comprises a T cell. In other embodiments, the cell comprises a B cell.

[0743] In some embodiments of any of the aspects, the cells are isolated from a subject. The term “isolated” as used herein signifies that the cells are placed into conditions other than their natural environment. The term “isolated” does not preclude the later use of these cells thereafter in combinations or mixtures with other cells. In some embodiments of any of the aspects, an immune cell (e.g., T cell) is: (a) isolated from the subject; (b) genetically modified to express a CAR polypeptide or CAR system as described herein; and (c) administered to the subject. In some embodiments of any of the aspects, the cells are isolated from a first subject and administered to a second subject. In some embodiments of any of the aspects, the immune cells are first differentiated from a somatic cell sample from the subject and then genetically modified to express a CAR polypeptide or CAR system as described herein.

[0744] In some embodiments of any of the aspects, specific cells exhibit enhanced expression and/or activity of specific CAR polypeptides. In some embodiments of any of the aspects, the cell is a CD4+ T cell comprising a V2 ON-switch CAR polypeptide (see e.g., FIG. 2A-2B, FIG. 3A-3B; e.g., SEQ ID NOs: 2, 35). In some embodiments of any of the aspects, the cell is a CD8+ T cell comprising a V2 ON-switch CAR polypeptide (see e.g., FIG. 2A-2B, FIG. 3A-3B; e.g., SEQ ID NO: 2, 35). In some embodiments of any of the aspects, the cell is a Treg comprising a V1 or V2 ON-switch CAR polypeptide (see e.g., FIG. 4A-4C; e.g., SEQ ID NOs: 1-2, 34-35). In some embodiments of any of the aspects, the cell is an NK cell comprising a V1 ON-switch CAR polypeptide or a first generation anti-Her2 NS3 CAR (see e.g., FIG. 5A-5C; e.g., SEQ ID NOs: 1, 34, 5, 38).

[0745] In some embodiments of any of the aspects, the cell comprises an inactivating modification of at least one HLA Class I gene in the cell. In some embodiments, an endogenous HLA (e.g., class I and/or class II major histocompatibility complexes) can be edited or removed, e.g., to reduce immunogenicity. In some embodiments, the genetic modification can comprise introduction and expression of non-canonical HLA-G and HLA-E to prevent NK cell-mediated lysis (see e.g., Riolobos L et al. 2013), which can provide a source of universal T cells for immunotherapy, e.g., cancer immune therapy. In some embodiments, the native T cell receptor locus can be removed and/or replaced (e.g., with a CAR polypeptide as described herein) to enhance targeted specificity.

[0746] Methods of engineering chimeric antigen receptor T cells (also known as CAR T cells) are known in the art. See e.g., US Patents U.S. Pat. Nos. 7,446,190, 8,399,645, 8,822,647, 9,212,229, 9,273,283, 9,447,194, 9,587,020, 9,932,405, U.S. Ser. No. 10/125,193, U.S. Ser. No. 10/221,245, U.S. Ser. No. 10/273,300, U.S. Ser. No. 10/287,354; US patent publication US20160152723; PCT publication WO2009091826, WO2012079000, WO2014165707, WO2015164740, WO2016168595A1, WO2017040945, WO2017100428, WO2017117112, WO2017149515, WO2018067992, WO2018102787, WO2018102786, WO2018165228, WO2019084288; the contents of each of which are incorporated herein by reference in their entireties.

[0747] In some embodiments, methods of genetically modifying a cell to express a CAR can comprise but are not limited to: transfection or electroporation of a cell with a vector encoding a CAR; transduction with a viral vector (e.g., retrovirus, lentivirus) encoding a CAR; gene editing using zin finger nucleases (ZFNs), transcription activator-like effector nucleases (TALENs), meganuclease-TALENs, or CRISPR-Cas; or any other methods known in the art of genetically modifying a cell to express a CAR.

[0748] In some embodiments of any of the aspects, the cells comprise additional approaches to controlling CAR activity, including suicide genes, dual-antigen receptors, and bi-molecule switches. In some embodiments of any of the aspects, the genetically modified T cells are engineered to include one or more genes that can induce apoptosis when activated by an extracellular molecule. Herpes simplex virus thymidine kinase (HSV-TK) and inducible caspase 9 (iCasp9) are two types of suicide genes that have been integrated into CAR-T cells. In the iCasp9 system, the suicide gene complex has two elements: a mutated FK506-binding protein with high specificity to the small molecule rimiducid/AP1903, and a gene encoding a pro-domain-deleted human caspase 9. Dosing the patient with rimiducid activates the suicide system, leading to rapid apoptosis of the genetically modified T cells. Although both the HSV-TK and iCasp9 systems demonstrate a noticeable function as a safety switch in clinical trials, some defects limit their application. HSV-TK is virus-derived and may be immunogenic to humans. It is also unclear whether the suicide gene strategies will act quickly enough in all situations to halt dangerous off-tumor cytotoxicity.

[0749] In the dual-antigen receptor approach, CAR-T cells are engineered to express two tumor-associated antigen receptors at the same time, reducing the likelihood that the T cells will attack non-tumor cells. Dual-antigen receptor CAR-T cells have been reported to have less intense side effects.

[0750] In a bispecific molecule switch approach, bispecific molecules target both a tumor-associated antigen and the CD3 molecule on the surface of T cells (e.g., bispecific T cell engagers (BiTEs)). This ensures that the CAR-T cells cannot become activated unless they are in close physical proximity to a tumor cell.

[0751] Small molecule drug conjugates adaptor technology can also be used to develop universal CARs. SMDCs (small molecule drug conjugates) platform in immuno-oncology is an experimental approach that makes possible the engineering of a single universal CAR T cell, which binds with extraordinarily high affinity to a benign molecule designated as fluorescein isothiocyanate (FITC). These cells are then used to treat various cancer types when co-administered with bispecific SMDC adaptor molecules. These unique bispecific adaptors are constructed with a FITC molecule and a tumor-homing molecule to precisely bridge the universal CAR T cell with the cancer cells, which causes localized T cell activation. Anti-tumor activity in mice is induced only when both the universal CAR T cells plus the correct antigen-specific adaptor molecules are present. Anti-tumor activity and toxicity can be controlled by adjusting the administered adaptor molecule dosing. Treatment of antigenically heterogeneous tumors can be achieved by administration of a mixture of the desired antigen-specific adaptors.

[0752] In some embodiments, the methods described herein relate to treating a subject having or diagnosed as having a disease or disorder (e.g., cancer, alloimmunity, autoimmunity, infectious disease, etc.) with a CAR polypeptide or CAR system as described herein. Subjects having such a disease or disorder can be identified by a physician using current methods of diagnosis for cancer, alloimmunity, autoimmunity, or infectious disease. Symptoms and/or complications which characterize these conditions and aid in diagnosis are known in the art. A family history of cancer, alloimmunity, autoimmunity, or infectious disease, or exposure to risk factors for cancer, alloimmunity, autoimmunity, or infectious disease can also aid in determining if a subject is likely to have such a disease or disorder, or in making a diagnosis of cancer, alloimmunity, autoimmunity, or infectious disease.

[0753] The compositions and methods described herein can be administered to a subject having or diagnosed as having cancer, alloimmunity, autoimmunity, or infectious disease. In some embodiments, the methods described herein comprise administering an effective amount of compositions described herein, e.g. a CAR polypeptide as described herein to a subject in order to alleviate a symptom of cancer, alloimmunity, autoimmunity, or infectious disease. As used herein, “alleviating a symptom” is ameliorating any condition or symptom associated with the cancer, alloimmunity, autoimmunity, or infectious disease. As compared with an equivalent untreated control, such reduction is by at least 5%, 10%, 20%, 40%, 50%, 60%, 80%, 90%, 95%, 99% or more as measured by any standard technique.

[0754] A variety of means for administering the compositions described herein to subjects are known to those of skill in the art. An agent can be administered intravenously by injection or by gradual infusion over time. Given an appropriate formulation for a given route, for example, agents useful in the methods and compositions described herein can be administered intravenously, intranasally, by inhalation, intraperitoneally, intramuscularly, subcutaneously, intracavity, intratumorally, and can be delivered by peristaltic means, if desired, or by other means known by those skilled in the art. In some embodiments of any of the aspects, the compounds used herein are administered orally, intravenously or intramuscularly. Administration can be local or systemic. Local administration, e.g., directly to the site of an organ or tissue transplant is specifically contemplated.

[0755] Therapeutic compositions containing at least one agent can be conventionally administered in a unit dose, for example. The term “unit dose” when used in reference to a therapeutic composition refers to physically discrete units suitable as unitary dosage for the subject, each unit containing a predetermined quantity of active material calculated to produce the desired therapeutic effect in association with the required physiologically acceptable diluent, i.e., carrier, or vehicle.

[0756] The compositions are administered in a manner compatible with the dosage formulation, and in a therapeutically effective amount. The quantity to be administered and timing depends on the subject to be treated, capacity of the subject's system to utilize the active ingredient, and degree of therapeutic effect desired.

[0757] In embodiments where the subject is administered a CAR cell and a drug to modulate the activity of the CAR polypeptide(s) (e.g., protease inhibitor and/or degron stabilizer), the cells and drug(s) can be administered together or separately. In embodiments where the subject is separately administered a CAR cell and a drug to modulate the activity of the CAR polypeptide(s), each of the compositions can be administered, separately, according to any of the dosages and administration routes/routines described herein.

[0758] The term “effective amount” as used herein refers to the amount of a CAR polypeptide as described herein needed to alleviate at least one or more symptom of the disease or disorder, and relates to a sufficient amount of pharmacological composition to provide the desired effect. The term “therapeutically effective amount” therefore refers to an amount of a CAR polypeptide as described herein that is sufficient to provide a particular anti-tumor effect when administered to a typical subject. An effective amount as used herein, in various contexts, would also include an amount sufficient to delay the development of a symptom of the disease, alter the course of a symptom disease (for example but not limited to, slowing the progression of a symptom of the disease), or reverse a symptom of the disease. Thus, it is not generally practicable to specify an exact “effective amount”. However, for any given case, an appropriate “effective amount” can be determined by one of ordinary skill in the art using only routine experimentation.

[0759] Effective amounts, toxicity, and therapeutic efficacy can be determined by standard pharmaceutical procedures in cell cultures or experimental animals, e.g., for determining the LD50 (the dose lethal to 50% of the population) and the ED50 (the dose therapeutically effective in 50% of the population). The dosage can vary depending upon the dosage form employed and the route of administration utilized. The dose ratio between toxic and therapeutic effects is the therapeutic index and can be expressed as the ratio LD50/ED50. Compositions and methods that exhibit large therapeutic indices are preferred. A therapeutically effective dose can be estimated initially from cell culture assays. Also, a dose can be formulated in animal models to achieve a circulating plasma concentration range that includes the IC50 (i.e., the concentration of a CAR polypeptide as described herein, which achieves a half-maximal inhibition of symptoms) as determined in cell culture, or in an appropriate animal model. Levels in plasma can be measured, for example, by high performance liquid chromatography. The effects of any particular dosage can be monitored by a suitable bioassay. The dosage can be determined by a physician and adjusted, as necessary, to suit observed effects of the treatment.

[0760] Effective amounts, toxicity, and therapeutic efficacy can be determined by standard pharmaceutical procedures in cell cultures or experimental animals, e.g., for determining the minimal effective dose and/or maximal tolerated dose. The dosage can vary depending upon the dosage form employed and the route of administration utilized. A therapeutically effective dose can be estimated initially from cell culture assays. Also, a dose can be formulated in animal models to achieve a dosage range between the minimal effective dose and the maximal tolerated dose. The effects of any particular dosage can be monitored by a suitable bioassay, e.g., assay for tumor growth and/or size among others. The dosage can be determined by a physician and adjusted, as necessary, to suit observed effects of the treatment.

[0761] It can generally be stated that a pharmaceutical composition comprising the cells, e.g., T cells or CAR cells, described herein may be administered at a dosage of 10² to 10¹⁰ cells/kg body weight, preferably 10⁵ to 10⁶ cells/kg body weight, including all integer values within those ranges. The number of cells will depend upon the ultimate use for which the composition is intended as will the type of cells included therein. For uses provided herein, the cells are generally in a volume of a liter or less, can be 500 mLs or less, even 250 mLs or 100 mLs or less. Hence the density of the desired cells is typically greater than 10⁶ cells/ml and generally is greater than 10⁷ cells/ml, generally 10⁸ cells/ml or greater. The clinically relevant number of immune cells can be apportioned into multiple infusions that cumulatively equal or exceed 10⁵, 10⁶, 10⁷, 10⁸, 10⁹, 10¹⁰, 10¹¹, or 10¹² cells. In some aspects of the present invention, particularly since all the infused cells will be redirected to a particular target antigen, lower numbers of cells, in the range of 10⁶/kilogram (10⁶-10¹¹ per patient) may be administered. CAR expressing cell compositions may be administered multiple times at dosages within these ranges. The cells may be allogeneic, syngeneic, xenogeneic, or autologous to the patient undergoing therapy. If desired, the treatment may also include administration of mitogens (e.g., PHA) or lymphokines, cytokines, and/or chemokines (e.g., IFN-γ, IL-2, IL-12, TNF-alpha, IL-18, and TNF-beta, GM-CSF, IL-4, IL-13, Flt3-L, RANTES, MIP1α, etc.) as described herein to enhance induction of the immune response. In some embodiments, the dosage can be from about 1×10⁵ cells to about 1×10⁸ cells per kg of body weight. In some embodiments, the dosage can be from about 1×10⁶ cells to about 1×10⁷ cells per kg of body weight. In some embodiments, the dosage can be about 1×10⁶ cells per kg of body weight. In some embodiments, one dose of cells can be administered. In some embodiments, the dose of cells can be repeated, e.g., once, twice, or more. In some embodiments, the dose of cells can be administered on, e.g., a daily, weekly, or monthly basis.

[0762] In certain embodiments, an effective dose of a composition comprising a CAR composition as described herein can be administered to a patient once. In certain embodiments, an effective dose of a composition comprising a CAR composition can be administered to a patient repeatedly. For systemic administration, subjects can be administered a therapeutic amount of a composition comprising a CAR composition, such as, e.g. 0.1 mg/kg, 0.5 mg/kg, 1.0 mg/kg, 2.0 mg/kg, 2.5 mg/kg, 5 mg/kg, 10 mg/kg, 15 mg/kg, 20 mg/kg, 25 mg/kg, 30 mg/kg, 40 mg/kg, 50 mg/kg, or more.

[0763] In some embodiments, the dose can be from about 2 mg/kg to about 15 mg/kg. In some embodiments, the dose can be about 2 mg/kg. In some embodiments, the dose can be about 4 mg/kg. In some embodiments, the dose can be about 5 mg/kg. In some embodiments, the dose can be about 6 mg/kg. In some embodiments, the dose can be about 8 mg/kg. In some embodiments, the dose can be about 10 mg/kg. In some embodiments, the dose can be about 15 mg/kg. In some embodiments, the dose can be from about 100 mg/m² to about 700 mg/m². In some embodiments, the dose can be about 250 mg/m². In some embodiments, the dose can be about 375 mg/m². In some embodiments, the dose can be about 400 mg/m². In some embodiments, the dose can be about 500 mg/m².

[0764] In some embodiments, the dose can be administered intravenously. In some embodiments, the intravenous administration can be an infusion occurring over a period of from about 10 minute to about 3 hours. In some embodiments, the intravenous administration can be an infusion occurring over a period of from about 30 minutes to about 90 minutes.

[0765] In some embodiments the dose can be administered about weekly. In some embodiments, the dose can be administered weekly. In some embodiments, the dose can be administered weekly for from about 12 weeks to about 18 weeks. In some embodiments the dose can be administered about every 2 weeks. In some embodiments the dose can be administered about every 3 weeks. In some embodiments, the dose can be from about 2 mg/kg to about 15 mg/kg administered about every 2 weeks. In some embodiments, the dose can be from about 2 mg/kg to about 15 mg/kg administered about every 3 weeks. In some embodiments, the dose can be from about 2 mg/kg to about 15 mg/kg administered intravenously about every 2 weeks. In some embodiments, the dose can be from about 2 mg/kg to about 15 mg/kg administered intravenously about every 3 weeks. In some embodiments, the dose can be from about 200 mg/m2 to about 400 mg/m2 administered intravenously about every week. In some embodiments, the dose can be from about 200 mg/m2 to about 400 mg/m2 administered intravenously about every 2 weeks. In some embodiments, the dose can be from about 200 mg/m2 to about 400 mg/m2 administered intravenously about every 3 weeks. In some embodiments, a total of from about 2 to about 10 doses are administered. In some embodiments, a total of 4 doses are administered. In some embodiments, a total of 5 doses are administered. In some embodiments, a total of 6 doses are administered. In some embodiments, a total of 7 doses are administered. In some embodiments, a total of 8 doses are administered. In some embodiments, the administration occurs for a total of from about 4 weeks to about 12 weeks. In some embodiments, the administration occurs for a total of about 6 weeks. In some embodiments, the administration occurs for a total of about 8 weeks. In some embodiments, the administration occurs for a total of about 12 weeks. In some embodiments, the initial dose can be from about 1.5 to about 2.5 fold greater than subsequent doses.

[0766] In some embodiments, the dose can be from about 1 mg to about 2000 mg. In some embodiments, the dose can be about 3 mg. In some embodiments, the dose can be about 10 mg. In some embodiments, the dose can be about 30 mg. In some embodiments, the dose can be about 1000 mg. In some embodiments, the dose can be about 2000 mg. In some embodiments, the dose can be about 3 mg given by intravenous infusion daily. In some embodiments, the dose can be about 10 mg given by intravenous infusion daily. In some embodiments, the dose can be about 30 mg given by intravenous infusion three times per week.

[0767] In some embodiments, after an initial treatment regimen, the treatments can be administered on a less frequent basis. For example, after treatment biweekly for three months, treatment can be repeated once per month, for six months or a year or longer. Treatment according to the methods described herein can reduce levels of a marker or symptom of a condition, e.g. by at least 10%, at least 15%, at least 20%, at least 25%, at least 30%, at least 40%, at least 50%, at least 60%, at least 70%, at least 80% or at least 90% or more.

[0768] The dosage of a composition as described herein can be determined by a physician and adjusted, as necessary, to suit observed effects of the treatment. With respect to duration and frequency of treatment, it is typical for skilled clinicians to monitor subjects in order to determine when the treatment is providing therapeutic benefit, and to determine whether to increase or decrease dosage, increase or decrease administration frequency, discontinue treatment, resume treatment, or make other alterations to the treatment regimen. The dosing schedule can vary from once a week to daily depending on a number of clinical factors, such as the subject's sensitivity to the CAR composition. The desired dose or amount can be administered at one time or divided into subdoses, e.g., 2-4 subdoses and administered over a period of time, e.g., at appropriate intervals through the day or other appropriate schedule. In some embodiments, administration can be chronic, e.g., one or more doses and/or treatments daily over a period of weeks or months. Examples of dosing and/or treatment schedules are administration daily, twice daily, three times daily or four or more times daily over a period of 1 week, 2 weeks, 3 weeks, 4 weeks, 1 month, 2 months, 3 months, 4 months, 5 months, or 6 months, or more. A composition comprising a CAR composition as described herein can be administered over a period of time, such as over a 5 minute, 10 minute, 15 minute, 20 minute, or 25 minute period.

[0769] The dosage ranges for the administration of a CAR composition, according to the methods described herein depend upon, for example, the form of the CAR composition, its potency, and the extent to which symptoms, markers, or indicators of a condition described herein are desired to be reduced, for example the percentage reduction desired for the disease or disorder (e.g., cancer). The dosage should not be so large as to cause adverse side effects, such as autoimmunity. Generally, the dosage will vary with the age, condition, and sex of the patient and can be determined by one of skill in the art. The dosage can also be adjusted by the individual physician in the event of any complication.

[0770] The efficacy of a CAR composition in, e.g. the treatment of a condition described herein can be determined by the skilled clinician. However, a treatment is considered “effective treatment,” as the term is used herein, if one or more of the signs or symptoms of a condition described herein are altered in a beneficial manner, other clinically accepted symptoms are improved, or even ameliorated, or a desired response is induced e.g., by at least 10% following treatment according to the methods described herein. Efficacy can be assessed, for example, by measuring a marker, indicator, symptom, and/or the incidence of a condition treated according to the methods described herein or any other measurable parameter appropriate, e.g. tumor size. Efficacy can also be measured by a failure of an individual to worsen as assessed by hospitalization, or need for medical interventions (i.e., progression of the disease is halted). Methods of measuring these indicators are known to those of skill in the art and/or are described herein. Treatment includes any treatment of a disease in an individual or an animal (some non-limiting examples include a human or an animal) and includes: (1) inhibiting the disease, e.g., preventing a worsening of symptoms (e.g. pain or inflammation); or (2) relieving the severity of the disease, e.g., causing regression of symptoms. An effective amount for the treatment of a disease means that amount which, when administered to a subject in need thereof, is sufficient to result in effective treatment as that term is defined herein, for that disease. Efficacy of an agent can be determined by assessing physical indicators of a condition or desired response, (e.g. tumor size). It is well within the ability of one skilled in the art to monitor efficacy of administration and/or treatment by measuring any one of such parameters, or any combination of parameters. Efficacy can be assessed in animal models of a condition described herein, for example treatment of cancer. When using an experimental animal model, efficacy of treatment is evidenced when a statistically significant change in a marker is observed, e.g. tumor size.

[0771] In vitro and animal model assays are provided herein which allow the assessment of a given dose of a CAR composition. The efficacy of a given dosage combination can also be assessed in an animal model, e.g. a specific cancer animal model.

[0772] In one aspect, described herein is a pharmaceutical composition comprising the at least one CAR polypeptide, CAR system, CAR polynucleotide, CAR vector, or CAR-comprising cell as described herein, which are collectively referred to as a “CAR composition” (see e.g., Tables 1-5, 7-9, 20). In some embodiments of any of the aspects, the pharmaceutical composition can comprise any combination of CAR polypeptides or systems (see e.g., Table 12). In some embodiments of any of the aspects, the pharmaceutical composition can further comprise a protease inhibitor and/or degron stabilizer as described herein.

[0773] In some embodiments, the technology described herein relates to a pharmaceutical composition comprising a CAR composition as described herein, and optionally a pharmaceutically acceptable carrier. In some embodiments, the active ingredients of the pharmaceutical composition comprise the CAR polypeptide, the CAR system, the protease inhibitor, and/or degron stabilizer as described herein. In some embodiments, the active ingredients of the pharmaceutical composition consist essentially of the CAR polypeptide, the CAR system, the protease inhibitor, and/or degron stabilizer as described herein. In some embodiments, the active ingredients of the pharmaceutical composition consist of the CAR polypeptide, the CAR system, the protease inhibitor, and/or degron stabilizer as described herein. Pharmaceutically acceptable carriers and diluents include saline, aqueous buffer solutions, solvents and/or dispersion media. The use of such carriers and diluents is well known in the art. Some non-limiting examples of materials which can serve as pharmaceutically-acceptable carriers include: (1) sugars, such as lactose, glucose and sucrose; (2) starches, such as corn starch and potato starch; (3) cellulose, and its derivatives, such as sodium carboxymethyl cellulose, methylcellulose, ethyl cellulose, microcrystalline cellulose and cellulose acetate; (4) powdered tragacanth; (5) malt; (6) gelatin; (7) lubricating agents, such as magnesium stearate, sodium lauryl sulfate and talc; (8) excipients, such as cocoa butter and suppository waxes; (9) oils, such as peanut oil, cottonseed oil, safflower oil, sesame oil, olive oil, corn oil and soybean oil; (10) glycols, such as propylene glycol; (11) polyols, such as glycerin, sorbitol, mannitol and polyethylene glycol (PEG); (12) esters, such as ethyl oleate and ethyl laurate; (13) agar; (14) buffering agents, such as magnesium hydroxide and aluminum hydroxide; (15) alginic acid; (16) pyrogen-free water; (17) isotonic saline; (18) Ringer's solution; (19) ethyl alcohol; (20) pH buffered solutions; (21) polyesters, polycarbonates and/or polyanhydrides; (22) bulking agents, such as polypeptides and amino acids; (23) serum component, such as serum albumin, HDL and LDL; (24) C₂-C₁₂ alcohols, such as ethanol; and (25) other non-toxic compatible substances employed in pharmaceutical formulations. Wetting agents, coloring agents, release agents, coating agents, sweetening agents, flavoring agents, perfuming agents, preservative and antioxidants can also be present in the formulation. The terms such as “excipient”, “carrier”, “pharmaceutically acceptable carrier” or the like are used interchangeably herein. In some embodiments, the carrier inhibits the degradation of the active agent, e.g. the CAR polypeptide, the CAR system, the protease inhibitor, and/or degron stabilizer as described herein.

[0774] In some embodiments, the pharmaceutical composition comprising a CAR composition as described herein can be a parenteral dose form. Since administration of parenteral dosage forms typically bypasses the patient's natural defenses against contaminants, parenteral dosage forms are preferably sterile or capable of being sterilized prior to administration to a patient. Examples of parenteral dosage forms include, but are not limited to, solutions ready for injection, dry products ready to be dissolved or suspended in a pharmaceutically acceptable vehicle for injection, suspensions ready for injection, and emulsions. In addition, controlled-release parenteral dosage forms can be prepared for administration of a patient, including, but not limited to, DUROS®-type dosage forms and dose-dumping.

[0775] Suitable vehicles that can be used to provide parenteral dosage forms of CAR compositions as disclosed within are well known to those skilled in the art. Examples include, without limitation: sterile water; water for injection USP; saline solution; glucose solution; aqueous vehicles such as but not limited to, sodium chloride injection, Ringer's injection, dextrose Injection, dextrose and sodium chloride injection, and lactated Ringer's injection; water-miscible vehicles such as, but not limited to, ethyl alcohol, polyethylene glycol, and propylene glycol; and non-aqueous vehicles such as, but not limited to, corn oil, cottonseed oil, peanut oil, sesame oil, ethyl oleate, isopropyl myristate, and benzyl benzoate.

[0776] Pharmaceutical compositions comprising CAR compositions can also be formulated to be suitable for oral administration, for example as discrete dosage forms, such as, but not limited to, tablets (including without limitation scored or coated tablets), pills, caplets, capsules, chewable tablets, powder packets, cachets, troches, wafers, aerosol sprays, or liquids, such as but not limited to, syrups, elixirs, solutions or suspensions in an aqueous liquid, a non-aqueous liquid, an oil-in-water emulsion, or a water-in-oil emulsion. Such compositions contain a predetermined amount of the pharmaceutically acceptable salt of the disclosed compounds, and may be prepared by methods of pharmacy well known to those skilled in the art. See generally, Remington: The Science and Practice of Pharmacy, 21st Ed., Lippincott, Williams, and Wilkins, Philadelphia Pa. (2005).

[0777] Conventional dosage forms generally provide rapid or immediate drug release from the formulation. Depending on the pharmacology and pharmacokinetics of the drug, use of conventional dosage forms can lead to wide fluctuations in the concentrations of the drug in a patient's blood and other tissues. These fluctuations can impact a number of parameters, such as dose frequency, onset of action, duration of efficacy, maintenance of therapeutic blood levels, toxicity, side effects, and the like. Advantageously, controlled-release formulations can be used to control a drug's onset of action, duration of action, plasma levels within the therapeutic window, and peak blood levels. In particular, controlled- or extended-release dosage forms or formulations can be used to ensure that the maximum effectiveness of a drug is achieved while minimizing potential adverse effects and safety concerns, which can occur both from under-dosing a drug (i.e., going below the minimum therapeutic levels) as well as exceeding the toxicity level for the drug. In some embodiments, the composition can be administered in a sustained release formulation.

[0778] Controlled-release pharmaceutical products have a common goal of improving drug therapy over that achieved by their non-controlled release counterparts. Ideally, the use of an optimally designed controlled-release preparation in medical treatment is characterized by a minimum of drug substance being employed to cure or control the condition in a minimum amount of time. Advantages of controlled-release formulations include: 1) extended activity of the drug; 2) reduced dosage frequency; 3) increased patient compliance; 4) usage of less total drug; 5) reduction in local or systemic side effects; 6) minimization of drug accumulation; 7) reduction in blood level fluctuations; 8) improvement in efficacy of treatment; 9) reduction of potentiation or loss of drug activity; and 10) improvement in speed of control of diseases or conditions. Kim, Cherng-ju, Controlled Release Dosage Form Design, 2 (Technomic Publishing, Lancaster, Pa.: 2000).

[0779] Most controlled-release formulations are designed to initially release an amount of drug (active ingredient) that promptly produces the desired therapeutic effect, and gradually and continually release other amounts of drug to maintain this level of therapeutic or prophylactic effect over an extended period of time. In order to maintain this constant level of drug in the body, the drug must be released from the dosage form at a rate that will replace the amount of drug being metabolized and excreted from the body. Controlled-release of an active ingredient can be stimulated by various conditions including, but not limited to, pH, ionic strength, osmotic pressure, temperature, enzymes, water, and other physiological conditions or compounds.

[0780] A variety of known controlled- or extended-release dosage forms, formulations, and devices can be adapted for use with the salts and compositions of the disclosure. Examples include, but are not limited to, those described in U.S. Pat. Nos. 3,845,770; 3,916,899; 3,536,809; 3,598,123; 4,008,719; 5,674,533; 5,059,595; 5,591,767; 5,120,548; 5,073,543; 5,639,476; 5,354,556; 5,733,566; and 6,365,185 B1; each of which is incorporated herein by reference. These dosage forms can be used to provide slow or controlled-release of one or more active ingredients using, for example, hydroxypropylmethyl cellulose, other polymer matrices, gels, permeable membranes, osmotic systems (such as OROS® (Alza Corporation, Mountain View, Calif. USA)), or a combination thereof to provide the desired release profile in varying proportions.

[0781] In some embodiments of any of the aspects, the CAR composition described herein is administered as a monotherapy, e.g., another treatment for the disease or disorder (e.g., cancer) is not administered to the subject.

[0782] In some embodiments of any of the aspects, the methods described herein can further comprise administering a second agent and/or treatment to the subject, e.g. as part of a combinatorial therapy. Non-limiting examples of a second agent and/or treatment can include radiation therapy, surgery, gemcitabine, cisplatin, paclitaxel, carboplatin, bortezomib, AMG479, vorinostat, rituximab, temozolomide, rapamycin, ABT-737, PI-103; alkylating agents such as thiotepa and CYTOXAN® cyclophosphamide; alkyl sulfonates such as busulfan, improsulfan and piposulfan; aziridines such as benzodopa, carboquone, meturedopa, and uredopa; ethylenimines and methylmelamines including altretamine, triethylenemelamine, trietylenephosphoramide, triethylenethiophosphoramide and trimethylol melamine; acetogenins (especially bullatacin and bullatacinone); a camptothecin (including the synthetic analogue topotecan); bryostatin; callystatin; CC-1065 (including its adozelesin, carzelesin and bizelesin synthetic analogues); cryptophycins (particularly cryptophycin 1 and cryptophycin 8); dolastatin; duocarmycin (including the synthetic analogues, KW-2189 and CB 1-TM1); eleutherobin; pancratistatin; a sarcodictyin; spongistatin; nitrogen mustards such as chlorambucil, chlornaphazine, cholophosphamide, estramustine, ifosfamide, mechlorethamine, mechlorethamine oxide hydrochloride, melphalan, novembichin, phenesterine, prednimustine, trofosfamide, uracil mustard; nitrosoureas such as carmustine, chlorozotocin, fotemustine, lomustine, nimustine, and ranimustine; antibiotics such as the enediyne antibiotics (e.g., calicheamicin, especially calicheamicin gammall and calicheamicin omegall (see, e.g., Agnew, Chem. Intl. Ed. Engl., 33: 183-186 (1994)); dynemicin, including dynemicin A; bisphosphonates, such as clodronate; an esperamicin; as well as neocarzinostatin chromophore and related chromoprotein enediyne antibiotic chromophores), aclacinomycins, actinomycin, authramycin, azaserine, bleomycins, cactinomycin, carabicin, caminomycin, carzinophilin, chromomycins, dactinomycin, daunorubicin, detorubicin, 6-diazo-5-oxo-L-norleucine, ADRIAMYCIN® doxorubicin (including morpholino-doxorubicin, cyanomorpholino-doxorubicin, 2-pyrrolino-doxorubicin and deoxydoxorubicin), epirubicin, esorubicin, idarubicin, marcellomycin, mitomycins such as mitomycin C, mycophenolic acid, nogalamycin, olivomycins, peplomycin, potfiromycin, puromycin, quelamycin, rodorubicin, streptonigrin, streptozocin, tubercidin, ubenimex, zinostatin, zorubicin; anti-metabolites such as methotrexate and 5-fluorouracil (5-FU); folic acid analogues such as denopterin, methotrexate, pteropterin, trimetrexate; purine analogs such as fludarabine, 6-mercaptopurine, thiamiprine, thioguanine; pyrimidine analogs such as ancitabine, azacitidine, 6-azauridine, carmofur, cytarabine, dideoxyuridine, doxifluridine, enocitabine, floxuridine; androgens such as calusterone, dromostanolone propionate, epitiostanol, mepitiostane, testolactone; anti-adrenals such as aminoglutethimide, mitotane, trilostane; folic acid replenisher such as frolinic acid; aceglatone; aldophosphamide glycoside; aminolevulinic acid; eniluracil; amsacrine; bestrabucil; bisantrene; edatraxate; defofamine; demecolcine; diaziquone; elformithine; elliptinium acetate; an epothilone; etoglucid; gallium nitrate; hydroxyurea; lentinan; lonidainine; maytansinoids such as maytansine and ansamitocins; mitoguazone; mitoxantrone; mopidanmol; nitraerine; pentostatin; phenamet; pirarubicin; losoxantrone; podophyllinic acid; 2-ethylhydrazide; procarbazine; PSK® polysaccharide complex (JHS Natural Products, Eugene, Oreg.); razoxane; rhizoxin; sizofuran; spirogermanium; tenuazonic acid; triaziquone; 2,2′,2″-trichlorotriethylamine; trichothecenes (especially T-2 toxin, verracurin A, roridin A and anguidine); urethan; vindesine; dacarbazine; mannomustine; mitobronitol; mitolactol; pipobroman; gacytosine; arabinoside (“Ara-C”); cyclophosphamide; thiotepa; taxoids, e.g., TAXOL® paclitaxel (Bristol-Myers Squibb Oncology, Princeton, N.J.), ABRAXANE® Cremophor-free, albumin-engineered nanoparticle formulation of paclitaxel (American Pharmaceutical Partners, Schaumberg, Ill.), and TAXOTERE® doxetaxel (Rhone-Poulenc Rorer, Antony, France); chloranbucil; GEMZAR® gemcitabine; 6-thioguanine; mercaptopurine; methotrexate; platinum analogs such as cisplatin, oxaliplatin and carboplatin; vinblastine; platinum; etoposide (VP-16); ifosfamide; mitoxantrone; vincristine; NAVELBINE® vinorelbine; novantrone; teniposide; edatrexate; daunomycin; aminopterin; xeloda; ibandronate; irinotecan (Camptosar, CPT-11) (including the treatment regimen of irinotecan with 5-FU and leucovorin); topoisomerase inhibitor RFS 2000; difluoromethylornithine (DMFO); retinoids such as retinoic acid; capecitabine; combretastatin; leucovorin (LV); oxaliplatin, including the oxaliplatin treatment regimen (FOLFOX); lapatinib (Tykerb®); inhibitors of PKC-alpha, Raf, H-Ras, EGFR (e.g., erlotinib (Tarceva®)) and VEGF-A that reduce cell proliferation and pharmaceutically acceptable salts, acids or derivatives of any of the above.

[0783] In addition, the methods of treatment can further include the use of radiation or radiation therapy. Further, the methods of treatment can further include the use of surgical treatments.

[0784] The CAR compositions described herein can be administered to a subject in need thereof, in particular the treatment of cancer. In some embodiments of any of the aspects, the CAR compositions described herein can be administered for the treatment of cancer, autoimmunity, alloimmunity, or infectious disease. Autoimmunity is the system of immune responses of an organism against its own healthy cells and tissues. Any disease that results from such an aberrant immune response is termed an “autoimmune disease”. Alloimmunity (sometimes called isoimmunity) is an immune response to non-self antigens from members of the same species, which are called alloantigens or isoantigens. Two major types of alloantigens are blood group antigens and histocompatibility antigens. Infectious diseases that can be treated with the CAR compositions described herein include any microorganism with a specific microbial antigen that can be targeted; the infectious diseases can be viral (e.g., HIV), bacterial, or fungal infections.

[0785] In some embodiments, the method of treatment can comprise first diagnosing a subject or patient who can benefit from treatment by a composition described herein. In some embodiments, such diagnosis comprises detecting or measuring an abnormal level of a marker (e.g., the tumor antigens as described herein) in a sample from the subject or patient. In some embodiments, the method further comprises administering to the patient a CAR composition as described herein.

[0786] In some embodiments, the subject has previously been determined to have an abnormal level of an analyte described herein relative to a reference. In some embodiments, the reference level can be the level in a sample of similar cell type, sample type, sample processing, and/or obtained from a subject of similar age, sex and other demographic parameters as the sample/subject. In some embodiments, the test sample and control reference sample are of the same type, that is, obtained from the same biological source, and comprising the same composition, e.g. the same number and type of cells.

[0787] The term “sample” or “test sample” as used herein denotes a sample taken or isolated from a biological organism, e.g., a blood or plasma sample from a subject. In some embodiments of any of the aspects, the technology described herein encompasses several examples of a biological sample. In some embodiments of any of the aspects, the biological sample is cells, or tissue, or peripheral blood, or bodily fluid. Exemplary biological samples include, but are not limited to, a biopsy, a tumor sample, biofluid sample; blood; serum; plasma; urine; sperm; mucus; tissue biopsy; organ biopsy; synovial fluid; bile fluid; cerebrospinal fluid; mucosal secretion; effusion; sweat; saliva; and/or tissue sample etc. The term also includes a mixture of the above-mentioned samples. The term “test sample” also includes untreated or pretreated (or pre-processed) biological samples. In some embodiments of any of the aspects, a test sample can comprise cells from a subject.

[0788] In some embodiments of any of the aspects, the step of determining if the subject has an abnormal level of an analyte described herein can comprise i) obtaining or having obtained a sample from the subject and ii) performing or having performed an assay on the sample obtained from the subject to determine/measure the level of the analyte in the subject. In some embodiments of any of the aspects, the step of determining if the subject has an abnormal level of an analyte described herein can comprise performing or having performed an assay on a sample obtained from the subject to determine/measure the level of analyte in the subject. In some embodiments of any of the aspects, the step of determining if the subject has an abnormal level of an analyte described herein can comprise ordering or requesting an assay on a sample obtained from the subject to determine/measure the level of the analyte in the subject. In some embodiments of any of the aspects, the step of determining if the subject has an abnormal level of an analyte described herein can comprise receiving the results of an assay on a sample obtained from the subject to determine/measure the level of the analyte in the subject. In some embodiments of any of the aspects, the step of determining if the subject has an abnormal level of an analyte described herein can comprise receiving a report, results, or other means of identifying the subject as a subject with a decreased level of the analyte.

[0789] In one aspect of any of the embodiments, described herein is a method of treating cancer (or another disease or disorder as described herein) in a subject in need thereof, the method comprising: a) determining if the subject has an abnormal level of an analyte described herein; and b) instructing or directing that the subject be administered a CAR composition as described herein if the level of the analyte is increased or otherwise abnormal relative to a reference. In some embodiments of any of the aspects, the step of instructing or directing that the subject be administered a particular treatment can comprise providing a report of the assay results. In some embodiments of any of the aspects, the step of instructing or directing that the subject be administered a particular treatment can comprise providing a report of the assay results and/or treatment recommendations in view of the assay results.

[0790] In one aspect, described herein is a method of decreasing the degradation of a CAR polypeptide, comprising the steps of: (a) providing a population of cells comprising an ON-switch CAR polypeptide or an AND-gate CAR system as described herein; and (b) contacting the population of cells with an effective amount of a protease inhibitor and/or an effective amount of a degron stabilizer.

[0791] In one aspect, described herein is a method of decreasing the degradation of a polypeptide, comprising the steps of: (a) providing a population of cells comprising an ON-switch CAR polypeptide as described herein; and (b) contacting the population of cells with an effective amount of a protease inhibitor.

[0792] In one aspect, described herein is a method of decreasing the degradation of a polypeptide, comprising the steps of: (a) providing a population of cells comprising an AND-gate CAR system as described herein; and (b) contacting the population of cells with an effective amount of a protease inhibitor and an effective amount of a degron stabilizer. In some embodiments of any of the aspects, the degron of the AND-gate CAR system is DHFR degron and the degron stabilizer is trimethoprim (TMP) or an analog thereof.

[0793] In one aspect, described herein is a method of modulating the degradation of a polypeptide system, comprising the steps of: (a) providing a population of cells comprising an AND-gate polypeptide or system described herein; (b) contacting the population of cells with an effective amount of a protease inhibitor to decrease the degradation of the polypeptide system; and (c) contacting the population of cells with an effective amount of a degron destabilizer to increase the degradation of the polypeptide system. In some embodiments of any of the aspects, the degron is a ligand-induced degradation (LID) domain and the degron destabilizer is Shield-1 or an analog thereof.

[0794] In some embodiments of any of the aspects, the degradation of the ON-switch CAR polypeptide or AND-gate CAR polypeptide is decreased by at least 10%, at least 20%, at least 30%, at least 40%, at least 50%, at least 60%, at least 70%, at least 80%, at least 90%, at least 100%, at least 200%, at least 300%, at least 400%, or at least 500% compared to prior to contacting with the protease inhibitor and/or or degron stabilizer.

[0795] In some embodiments of any of the aspects, the decrease in degradation results in an increase of activity of the ON-switch CAR polypeptide or AND-gate CAR system of at least 10%, at least 20%, at least 30%, at least 40%, at least 50%, at least 60%, at least 70%, at least 80%, at least 90%, at least 100%, at least 200%, at least 300%, at least 400%, or at least 500% compared to prior to contacting with the protease inhibitor and/or degron stabilizer. In some embodiments of any of the aspects, the increase of activity of the polypeptide comprises an increase in intracellular signaling of the intracellular signaling domains of the polypeptide.

[0796] In some embodiments of any of the aspects, the increase in intracellular signaling results in an increase of activation of the population of cells. In some embodiments of any of the aspects, the activation of the population of cells comprises expression of activation markers comprising CD69. Non-limiting examples of markers for T cell activation include CD107a, CD69, NFAT, CD25, and HLA-DR. In some embodiments of any of the aspects, the activation of the population of cells comprises cytokines comprising IL-2 and IFNg. Non-limiting examples of T cell cytokines include IL-2, IFNg, TNFa, lymphotoxin, and granulocyte-macrophage colony-stimulating factor (GM-CSF).

[0797] In some embodiments of any of the aspects, an increase of activation of the population of cells results in an increased killing efficiency of a target cell. In some embodiments of any of the aspects, the target cell is a tumor cell or a cancer cell. In some embodiments of any of the aspects, the target cell is a tumor or cancer cell expressing the cognate antigen for the extracellular binding domain of the CAR polypeptide or CAR system.

[0798] In some embodiments of any of the aspects, the degradation is increased by at least 10%, at least 20%, at least 30%, at least 40%, at least 50%, at least 60%, at least 70%, at least 80%, at least 90%, at least 100%, at least 200%, at least 300%, at least 400%, or at least 500% compared to prior to contacting with the degron destabilizer. In some embodiments of any of the aspects, the increase in degradation results in a decrease of activity of the polypeptide of at least 10%, at least 20%, at least 30%, at least 40%, at least 50%, at least 60%, at least 70%, at least 80%, at least 90%, at least 100%, at least 200%, at least 300%, at least 400%, or at least 500% compared to prior to contacting with the degron destabilizer. In some embodiments of any of the aspects, the decrease of activity of the polypeptide system comprises a decrease in intracellular signaling of the intracellular signaling domains of the polypeptide system. In some embodiments of any of the aspects, the decrease in intracellular signaling results in a decrease of activation of the population of cells. In some embodiments of any of the aspects, a decrease of activation of the population of cells results in a decreased killing efficiency of a target cell. In some embodiments of any of the aspects, the target cell expresses an antigen that binds to the extracellular binding domain of the first polypeptide of the system and an antigen that binds to the extracellular binding domain of the second polypeptide of the system.

[0799] In some embodiments of any of the aspects, the population of cells comprises immune cells. In some embodiments of any of the aspects, the population of immune cells comprises CD4+ T cells, CD8+ T cells, Tregs, or NK cells.

[0800] In one aspect, described herein is a method of treating a subject in need of a cell-based therapy. In some embodiments of any of the aspects, a subject in need of a cell-based therapy comprises a subject with cancer, alloimmunity, autoimmunity, infectious disease or another disease or disorder as described herein. Accordingly, the method comprises the steps of: (a) administering to the subject a population of cells comprising an ON-switch CAR polypeptide or an AND-gate CAR system as described herein; and (b) administering to the subject an effective amount of a protease inhibitor and/or an effective amount of a degron stabilizer. In some embodiments of any of the aspects, the subject has a cancer expressing an antigen that binds to the extracellular binding domain of the polypeptide.

[0801] In one aspect, described herein is a method of treating a subject in need of a cell-based therapy comprising the steps of: (a) administering to the subject a population of cells comprising an ON-switch CAR polypeptide as described herein; and (b) administering to the subject an effective amount of a protease inhibitor.

[0802] In one aspect, described herein is a method of treating a subject in need of a cell-based therapy comprising the steps of: (a) administering to the subject a population of cells comprising an AND-gate CAR system as described herein; and (b) administering to the subject an effective amount of a protease inhibitor and an effective amount of a degron stabilizer. In some embodiments of any of the aspects, the degron of the AND-gate CAR system is DHFR degron and the degron stabilizer is trimethoprim (TMP) or an analog thereof.

[0803] In one aspect described herein is a method of treating a subject in need of a cell-based therapy comprising the steps of: (a) administering to the subject a population of cells comprising an AND-gate CAR polypeptide or system as described herein; (b) administering to the subject an effective amount of a protease inhibitor; and (c) administering to the subject an effective amount of a degron destabilizer. In some embodiments of any of the aspects, the degron of the ANG-gate CAR system is a ligand-induced degradation (LID) domain and the degron destabilizer is Shield-1 or an analog thereof.

[0804] In some embodiments of any of the aspects, the protease inhibitor, degron stabilizer, and/or degron destabilizer is administered at the same time the population of cells is administered. In some embodiments of any of the aspects, the protease inhibitor, degron stabilizer, and/or degron destabilizer is administered after the population of cells is administered. As a non-limiting example, the protease inhibitor, degron stabilizer, and/or degron destabilizer is administered at least 1 minute, at least 2 minutes, at least 3 minutes, at least 4 minutes, at least 5 minutes, at least 10 minutes, at least 20 minutes, at least 30 minutes, at least 1 hour, at least 2 hours, at least 3 hours, at least 6 hours, at least 12 hours, at least 24 hours, at least 2 days, at least 3 days, at least 4 days, at least 5 days, at least 6 days, at least 7 days, at least 1.5 weeks, at least 2 weeks, at least 3 weeks, at least 4 weeks, at least 5 weeks, at least 6 weeks, at least 7 weeks, at least 8 weeks, at least 9 weeks, at least 10 weeks, at least 1 month, at least 2 months, at least 3 months, at least 4 months, at least 5 months, at least 6 months, at least 7 months, at least 8 months, at least 9 months, at least 10 months, at least 11 months, or at least 1 year after the population of cells is administered. In some embodiments of any of the aspects, the protease inhibitor, degron stabilizer, and/or degron destabilizer is administered continuously, e.g., using an IV.

[0805] In some embodiments of any of the aspects, a withdrawal or decrease in concentration (e.g., below an effective level) of the protease inhibitor and/or degron stabilizer results in increased degradation of the ON-switch or AND-gate CAR polypeptide(s). In some embodiments of any of the aspects, a withdrawal or decrease in concentration of the protease inhibitor and/or degron stabilizer results in decreased activity of the ON-switch or AND-gate CAR polypeptide(s). In some embodiments of any of the aspects, the concentration of the protease inhibitor and/or degron stabilizer is withdrawn or decreased below an effective level due to adverse side effects of the ON-switch or AND-gate CAR system. In some embodiments of any of the aspects, the concentration of the protease inhibitor and/or degron stabilizer is withdrawn or decreased below an effective level due to completion of the ON-switch or AND-gate CAR cell-based therapy and/or successful treatment of the disease or disorder (e.g., cancer).

[0806] In some embodiments of any of the aspects, an increase in concentration (e.g., above an effective level) of the degron destabilizer results in increased degradation of the AND-gate CAR polypeptide. In some embodiments of any of the aspects, an increase in concentration of the degron destabilizer results in decreased activity of the AND-gate CAR polypeptide. In some embodiments of any of the aspects, the concentration of the degron destabilizer is increased above an effective level due to adverse side effects of the AND-gate CAR system. In some embodiments of any of the aspects, the concentration of the degron destabilizer is increased above an effective level due to completion of the AND-gate CAR cell-based therapy and/or successful treatment of the disease or disorder (e.g., cancer).

[0807] In one aspect, described herein is a method of decreasing the activity of a polypeptide system, comprising the steps of: (a) providing a population of cells comprising an OFF-switch CAR polypeptide or an OFF-switch CAR system as described herein; and (b) contacting the population of cells with an effective amount of a protease inhibitor. In some embodiments of any of the aspects, the population of cells comprises immune cells. In some embodiments of any of the aspects, the population of immune cells comprises CD4+ T cells, CD8+ T cells, Tregs, or NK cells.

[0808] In some embodiments of any of the aspects, wherein the activity (e.g., of the OFF-switch CAR polypeptide) is decreased by at least 10%, at least 20%, at least 30%, at least 40%, at least 50%, at least 60%, at least 70%, at least 80%, at least 90%, at least 100%, at least 200%, at least 300%, at least 400%, or at least 500% compared to prior to contacting with the protease inhibitor.

[0809] In some embodiments of any of the aspects, the decrease of activity of the OFF-switch CAR polypeptide system comprises a decrease in intracellular signaling of the intracellular signaling domains of the polypeptide system. In some embodiments of any of the aspects, the decrease in intracellular signaling results in a decrease of activation of the population of cells. In some embodiments of any of the aspects, the activation of the population of cells comprises expression of activation markers (e.g., CD69 or other activation markers as described herein) and/or expression of cytokines (e.g., IL-2, IFNg, or other cytokines as described herein).

[0810] In some embodiments of any of the aspects, a decrease of activation of the population of cells (e.g., comprising an OFF-switch CAR system) results in a decreased killing efficiency of a target cell. In some embodiments of any of the aspects, the target cell expresses an antigen that binds to the extracellular binding domain of one or both of the OFF-switch CAR polypeptides.

[0811] In one aspect, described herein is a method of treating a subject in need of a cell-based therapy comprising the steps of: (a) administering to the subject a population of cells comprising an OFF-switch polypeptide or system as described herein; and (b) administering to the subject an effective amount of a protease inhibitor. In some embodiments of any of the aspects, the subject has a cancer expressing an antigen that binds to the extracellular binding domain of the polypeptide.

[0812] In some embodiments of any of the aspects, the protease inhibitor is administered at the same time the population of cells is administered. In some embodiments of any of the aspects, the protease inhibitor is administered after the population of cells is administered. As a non-limiting example, the protease inhibitor is administered at least 1 minute, at least 2 minutes, at least 3 minutes, at least 4 minutes, at least 5 minutes, at least 10 minutes, at least 20 minutes, at least 30 minutes, at least 1 hour, at least 2 hours, at least 3 hours, at least 6 hours, at least 12 hours, at least 24 hours, at least 2 days, at least 3 days, at least 4 days, at least 5 days, at least 6 days, or at least 7 days after the population of cells is administered. In some embodiments of any of the aspects, the protease inhibitor is administered continuously, e.g., using an IV.

[0813] In some embodiments of any of the aspects, an increase in concentration of the protease inhibitor results in decreased activity of the OFF-switch CAR polypeptide system. In some embodiments of any of the aspects, the concentration of the protease inhibitor is increased above an effective level due to adverse side effects of the OFF-switch CAR composition. In some embodiments of any of the aspects, the concentration of the protease inhibitor is increased above an effective level due to completion of the cell-based therapy and/or successful treatment of the disease or disorder (e.g., cancer).

[0814] In one aspect, described herein is a method of increasing the activity of a polypeptide system, comprising the steps of: (a) providing a population of cells comprising a reader CAR polypeptide system as described herein; and (b) contacting the population of cells with an effective amount of a protease inhibitor. In some embodiments of any of the aspects, the population of cells comprises immune cells. In some embodiments of any of the aspects, the population of immune cells comprises CD4+ T cells, CD8+ T cells, Tregs, or NK cells.

[0815] In some embodiments of any of the aspects, the activity of the reader CAR system is increased by at least 10%, at least 20%, at least 30%, at least 40%, at least 50%, at least 60%, at least 70%, at least 80%, at least 90%, at least 100%, at least 200%, at least 300%, at least 400%, or at least 500% compared to prior to contacting with the protease inhibitor.

[0816] In some embodiments of any of the aspects, the increase of activity of the reader polypeptide system comprises an increase in intracellular signaling of the intracellular signaling domains of the polypeptide system. In some embodiments of any of the aspects, the increase in intracellular signaling results in an increase of activation of the population of cells. In some embodiments of any of the aspects, the activation of the population of cells comprises expression of activation markers (e.g., CD69 or other activation markers as described herein) and/or expression of cytokines (e.g., IL-2, IFNg, or other cytokines as described herein).

[0817] In some embodiments of any of the aspects, an increase of activation of the population of cells (e.g. comprising a reader CAR system) results in an increased killing efficiency of a target cell. In some embodiments of any of the aspects, the target cell expresses an antigen that binds to the extracellular binding domain of a reader CAR polypeptide.

[0818] In one aspect, described herein is a method of treating a subject in need of a cell-based therapy comprising the steps of: (a) administering to the subject a population of cells comprising a reader CAR polypeptide system as described herein; and (b) administering to the subject an effective amount of a protease inhibitor. In some embodiments of any of the aspects, the subject has a cancer expressing an antigen that binds to the extracellular binding domain of the reader CAR polypeptide(s).

[0819] In some embodiments of any of the aspects, the protease inhibitor is specific to the reader CAR polypeptide. As a non-limiting example, danoprevir is administered in combination with a danoprevir-responsive reader (e.g., DNCR2), and grazoprevir is administered in combination with a grazoprevir-responsive reader (e.g., GNCR1). In some embodiments of any of the aspects, the protease inhibitor is administered at the same time the population of cells is administered. In some embodiments of any of the aspects, the protease inhibitor is administered after the population of cells is administered. As a non-limiting example, the protease inhibitor is administered at least 1 minute, at least 2 minutes, at least 3 minutes, at least 4 minutes, at least 5 minutes, at least 10 minutes, at least 20 minutes, at least 30 minutes, at least 1 hour, at least 2 hours, at least 3 hours, at least 6 hours, at least 12 hours, at least 24 hours, at least 2 days, at least 3 days, at least 4 days, at least 5 days, at least 6 days, or at least 7 days after the population of cells is administered. In some embodiments of any of the aspects, the protease inhibitor is administered continuously, e.g., using an IV.

[0820] In some embodiments of any of the aspects, an increase in concentration of the protease inhibitor results in increased activity of the reader CAR polypeptide system. In some embodiments of any of the aspects, the concentration of the protease inhibitor is withdrawn or decreased below an effective level due to adverse side effects of the reader CAR composition. In some embodiments of any of the aspects, the concentration of the protease inhibitor is withdrawn or decreased below an effective level due to completion of the reader CAR cell-based therapy and/or successful treatment of the disease or disorder (e.g., cancer).

[0821] In some embodiments of any of the aspects, the reader CAR system comprises multiple reader CAR polypeptides that are each responsive to a specific protease inhibitor, e.g., a “three-component reader CAR system” or “multi-component reader CAR system” as described further herein. Accordingly, in one aspect described herein is a method of modulating activity of a reader CAR system comprising: (a) providing a population of cells comprising a three-component (or 4 or 5 or more) reader CAR polypeptide system; (b) contacting the population of cells with an effective amount of a first protease inhibitor that binds to the first reader CAR polypeptide to increase the activity of the first reader CAR polypeptide; (c) contacting the population of cells with an effective amount of a second protease inhibitor that binds to the second reader CAR polypeptide to increase the activity of the second reader CAR polypeptide; and so forth for any additional reader CAR polypeptides with a different reader domain from the first two reader CAR polypeptides.

[0822] In another aspect, described herein is a method of treating a subject in need of a cell-based therapy comprising the steps of: (a) administering to the subject a population of cells comprising a three-component (or 4 or 5 or more) reader CAR polypeptide system as described herein; (b) administering to the subject an effective amount of a first protease inhibitor that binds to the first reader CAR polypeptide to target the antigen of the first reader CAR polypeptide; (c) administering to the subject an effective amount of a second protease inhibitor that binds to the second reader CAR polypeptide to target the antigen of the second reader CAR polypeptide; and so forth for any additional reader CAR polypeptides with a different reader domain from the first two reader CAR polypeptides.

[0823] As used herein, the term “cancer” relates generally to a class of diseases or conditions in which abnormal cells divide without control and can invade nearby tissues. Cancer cells can also spread to other parts of the body through the blood and lymph systems. There are several main types of cancer. Carcinoma is a cancer that begins in the skin or in tissues that line or cover internal organs. Sarcoma is a cancer that begins in bone, cartilage, fat, muscle, blood vessels, or other connective or supportive tissue. Leukemia is a cancer that starts in blood-forming tissue such as the bone marrow, and causes large numbers of abnormal blood cells to be produced and enter the blood. Lymphoma and multiple myeloma are cancers that begin in the cells of the immune system. Central nervous system cancers are cancers that begin in the tissues of the brain and spinal cord.

[0824] In some embodiments of any of the aspects, the cancer is a primary cancer. In some embodiments of any of the aspects, the cancer is a malignant cancer. As used herein, the term “malignant” refers to a cancer in which a group of tumor cells display one or more of uncontrolled growth (i.e., division beyond normal limits), invasion (i.e., intrusion on and destruction of adjacent tissues), and metastasis (i.e., spread to other locations in the body via lymph or blood). As used herein, the term “metastasize” refers to the spread of cancer from one part of the body to another. A tumor formed by cells that have spread is called a “metastatic tumor” or a “metastasis.” The metastatic tumor contains cells that are like those in the original (primary) tumor. As used herein, the term “benign” or “non-malignant”refers to tumors that may grow larger but do not spread to other parts of the body. Benign tumors are self-limited and typically do not invade or metastasize.

[0825] A “cancer cell” or “tumor cell” refers to an individual cell of a cancerous growth or tissue. A tumor refers generally to a swelling or lesion formed by an abnormal growth of cells, which may be benign, pre-malignant, or malignant. Most cancer cells form tumors, but some, e.g., leukemia, do not necessarily form tumors. For those cancer cells that form tumors, the terms cancer (cell) and tumor (cell) are used interchangeably.

[0826] As used herein the term “neoplasm” refers to any new and abnormal growth of tissue, e.g., an abnormal mass of tissue, the growth of which exceeds and is uncoordinated with that of the normal tissues. Thus, a neoplasm can be a benign neoplasm, premalignant neoplasm, or a malignant neoplasm.

[0827] A subject that has a cancer or a tumor is a subject having objectively measurable cancer cells present in the subject's body. Included in this definition are malignant, actively proliferative cancers, as well as potentially dormant tumors or micrometastases. Cancers which migrate from their original location and seed other vital organs can eventually lead to the death of the subject through the functional deterioration of the affected organs.

[0828] Examples of cancer include but are not limited to, carcinoma, lymphoma, blastoma, sarcoma, leukemia, basal cell carcinoma, biliary tract cancer; bladder cancer; bone cancer; brain and CNS cancer; breast cancer; cancer of the peritoneum; cervical cancer; choriocarcinoma; colon and rectum cancer; connective tissue cancer; cancer of the digestive system; endometrial cancer; esophageal cancer; eye cancer; cancer of the head and neck; gastric cancer (including gastrointestinal cancer); glioblastoma (GBM); hepatic carcinoma; hepatoma; intra-epithelial neoplasm.; kidney or renal cancer; larynx cancer; leukemia; liver cancer; lung cancer (e.g., small-cell lung cancer, non-small cell lung cancer, adenocarcinoma of the lung, and squamous carcinoma of the lung); lymphoma including Hodgkin's and non-Hodgkin's lymphoma; melanoma; myeloma; neuroblastoma; oral cavity cancer (e.g., lip, tongue, mouth, and pharynx); ovarian cancer; pancreatic cancer; prostate cancer; retinoblastoma; rhabdomyosarcoma; rectal cancer; cancer of the respiratory system; salivary gland carcinoma; sarcoma; skin cancer; squamous cell cancer; stomach cancer; testicular cancer; thyroid cancer; uterine or endometrial cancer; cancer of the urinary system; vulval cancer; as well as other carcinomas and sarcomas; as well as B-cell lymphoma (including low grade/follicular non-Hodgkin's lymphoma (NHL); small lymphocytic (SL) NHL; intermediate grade/follicular NHL; intermediate grade diffuse NHL; high grade immunoblastic NHL; high grade lymphoblastic NHL; high grade small non-cleaved cell NHL; bulky disease NHL; mantle cell lymphoma; AIDS-related lymphoma; and Waldenstrom's Macroglobulinemia); chronic lymphocytic leukemia (CLL); acute lymphoblastic leukemia (ALL); Hairy cell leukemia; chronic myeloblastic leukemia; and post-transplant lymphoproliferative disorder (PTLD), as well as abnormal vascular proliferation associated with phakomatoses, edema (such as that associated with brain tumors), and Meigs' syndrome.

[0829] A “cancer cell” is a cancerous, pre-cancerous, or transformed cell, either in vivo, ex vivo, or in tissue culture, that has spontaneous or induced phenotypic changes that do not necessarily involve the uptake of new genetic material. Although transformation can arise from infection with a transforming virus and incorporation of new genomic nucleic acid, or uptake of exogenous nucleic acid, it can also arise spontaneously or following exposure to a carcinogen, thereby mutating an endogenous gene. Transformation/cancer is associated with, e.g., morphological changes, immortalization of cells, aberrant growth control, foci formation, anchorage independence, malignancy, loss of contact inhibition and density limitation of growth, growth factor or serum independence, tumor specific markers, invasiveness or metastasis, and tumor growth in suitable animal hosts such as nude mice.

[0830] In various embodiments, an immune cell (e.g., Treg) comprising a CAR polypeptide or CAR system can be used to treat an autoimmune disease. In some embodiments, an immune cell (e.g., T cell) comprising a CAR polypeptide or CAR system directed against an autoimmune disease-specific antigen can be used to treat an autoimmune disease. “Autoimmune disease” refers to a class of diseases in which a subject's own antibodies react with host tissue or in which immune effector T cells are autoreactive to endogenous self-peptides and cause destruction of tissue. Thus an immune response is mounted against a subject's own antigens, referred to as self-antigens. A “self-antigen” as used herein refers to an antigen of a normal host tissue. Normal host tissue does not include neoplastic cells.

[0831] Autoantigens, as used herein, are endogenous proteins or fragments thereof that elicit this pathogenic immune response. Autoantigen can be any substance or a portion thereof normally found within a mammal that, in an autoimmune disease, becomes the primary (or a primary) target of attack by the immune system. The term also includes antigenic substances that induce conditions having the characteristics of an autoimmune disease when administered to mammals. Additionally, the term includes peptic subclasses consisting essentially of immunodominant epitopes or immunodominant epitope regions of autoantigens. Immunodominant epitopes or regions in induced autoimmune conditions are fragments of an autoantigen that can be used instead of the entire autoantigen to induce the disease. In humans afflicted with an autoimmune disease, immunodominant epitopes or regions are fragments of antigens specific to the tissue or organ under autoimmune attack and recognized by a substantial percentage (e.g. a majority though not necessarily an absolute majority) of autoimmune attack T-cells.

[0832] Autoantigens that are known to be associated with autoimmune disease include myelin proteins with demyelinating diseases, e.g. multiple sclerosis and experimental autoimmune myelitis; collagens and rheumatoid arthritis; insulin, proinsulin, glutamic acid decarboxylase 65 (GAD65); islet cell antigen (ICA512; ICA12) with insulin dependent diabetes.

[0833] A common feature in a number of autoimmune related diseases and inflammatory conditions is the involvement of pro-inflammatory CD4+ T cells. These T cells are responsible for the release of inflammatory, Th1 type cytokines. Cytokines characterized as Th1 type include interleukin 2 (IL-2), γ-interferon, TNFα and IL-12. Such pro-inflammatory cytokines act to stimulate the immune response, in many cases resulting in the destruction of autologous tissue. Cytokines associated with suppression of T cell response are the Th2 type, and include IL-10, IL-4 and TGF-β. It has been found that Th1 and Th2 type T cells may use the identical antigen receptor in response to an immunogen; in the former producing a stimulatory response and in the latter a suppressive response.

[0834] Provided herein is a method of treating an autoimmune disease, which comprises administering an effective amount of a CAR composition to a patient in need thereof. In one embodiment of any one of the methods described, the autoimmune disorder is selected from the group consisting of thyroiditis, type 1 diabetes mellitus, Hashimoto's thyroidits, Graves' disease, celiac disease, multiple sclerosis, Guillain-Barre syndrome, Addison's disease, and Raynaud's phenomenon, Goodpasture's disease, arthritis (rheumatoid arthritis such as acute arthritis, chronic rheumatoid arthritis, gout or gouty arthritis, acute gouty arthritis, acute immunological arthritis, chronic inflammatory arthritis, degenerative arthritis, type II collagen-induced arthritis, infectious arthritis, Lyme arthritis, proliferative arthritis, psoriatic arthritis, Still's disease, vertebral arthritis, and juvenile-onset rheumatoid arthritis, arthritis chronica progrediente, arthritis deformans, polyarthritis chronica primaria, reactive arthritis, and ankylosing spondylitis), inflammatory hyperproliferative skin diseases, psoriasis such as plaque psoriasis, gutatte psoriasis, pustular psoriasis, and psoriasis of the nails, atopy including atopic diseases such as hay fever and Job's syndrome, dermatitis including contact dermatitis, chronic contact dermatitis, exfoliative dermatitis, allergic dermatitis, allergic contact dermatitis, dermatitis herpetiformis, nummular dermatitis, seborrheic dermatitis, non-specific dermatitis, primary irritant contact dermatitis, and atopic dermatitis, x-linked hyper IgM syndrome, allergic intraocular inflammatory diseases, urticaria such as chronic allergic urticaria and chronic idiopathic urticaria, including chronic autoimmune urticaria, myositis, polymyositis/dermatomyositis, juvenile dermatomyositis, toxic epidermal necrolysis, scleroderma (including systemic scleroderma), sclerosis such as systemic sclerosis, multiple sclerosis (MS) such as spino-optical MS, primary progressive MS (PPMS), and relapsing remitting MS (RRMS), progressive systemic sclerosis, atherosclerosis, arteriosclerosis, sclerosis disseminata, ataxic sclerosis, neuromyelitis optica (NMO), inflammatory bowel disease (IBD) (for example, Crohn's disease, autoimmune-mediated gastrointestinal diseases, colitis such as ulcerative colitis, colitis ulcerosa, microscopic colitis, collagenous colitis, colitis polyposa, necrotizing enterocolitis, and transmural colitis, and autoimmune inflammatory bowel disease), bowel inflammation, pyoderma gangrenosum, erythema nodosum, primary sclerosing cholangitis, respiratory distress syndrome, including adult or acute respiratory distress syndrome (ARDS), meningitis, inflammation of all or part of the uvea, iritis, choroiditis, an autoimmune hematological disorder, rheumatoid spondylitis, rheumatoid synovitis, hereditary angioedema, cranial nerve damage as in meningitis, herpes gestationis, pemphigoid gestationis, pruritis scroti, autoimmune premature ovarian failure, sudden hearing loss due to an autoimmune condition, IgE-mediated diseases such as anaphylaxis and allergic and atopic rhinitis, encephalitis such as Rasmussen's encephalitis and limbic and/or brainstem encephalitis, uveitis, such as anterior uveitis, acute anterior uveitis, granulomatous uveitis, nongranulomatous uveitis, phacoantigenic uveitis, posterior uveitis, or autoimmune uveitis, glomerulonephritis (GN) with and without nephrotic syndrome such as chronic or acute glomerulonephritis such as primary GN, immune-mediated GN, membranous GN (membranous nephropathy), idiopathic membranous GN or idiopathic membranous nephropathy, membrano- or membranous proliferative GN (MPGN), including Type I and Type II, and rapidly progressive GN, proliferative nephritis, autoimmune polyglandular endocrine failure, balanitis including balanitis circumscripta plasmacellularis, balanoposthitis, erythema annulare centrifugum, erythema dyschromicum perstans, eythema multiform, granuloma annulare, lichen nitidus, lichen sclerosus et atrophicus, lichen simplex chronicus, lichen spinulosus, lichen planus, lamellar ichthyosis, epidermolytic hyperkeratosis, premalignant keratosis, pyoderma gangrenosum, allergic conditions and responses, allergic reaction, eczema including allergic or atopic eczema, asteatotic eczema, dyshidrotic eczema, and vesicular palmoplantar eczema, asthma such as asthma bronchiale, bronchial asthma, and auto-immune asthma, conditions involving infiltration of T cells and chronic inflammatory responses, immune reactions against foreign antigens such as fetal A-B-O blood groups during pregnancy, chronic pulmonary inflammatory disease, autoimmune myocarditis, leukocyte adhesion deficiency, lupus, including lupus nephritis, lupus cerebritis, pediatric lupus, non-renal lupus, extra-renal lupus, discoid lupus and discoid lupus erythematosus, alopecia lupus, systemic lupus erythematosus (SLE) such as cutaneous SLE or subacute cutaneous SLE, neonatal lupus syndrome (NLE), and lupus erythematosus disseminatus, juvenile onset (Type I) diabetes mellitus, including pediatric insulin-dependent diabetes mellitus (IDDM), adult onset diabetes mellitus (Type II diabetes), autoimmune diabetes, idiopathic diabetes insipidus, diabetic retinopathy, diabetic nephropathy, diabetic large-artery disorder, immune responses associated with acute and delayed hypersensitivity mediated by cytokines and T-lymphocytes, sarcoidosis, granulomatosis including lymphomatoid granulomatosis, Wegener's granulomatosis, agranulocytosis, vasculitides, including vasculitis, large-vessel vasculitis (including polymyalgia rheumatica and giant-cell (Takayasu's) arteritis), medium-vessel vasculitis (including Kawasaki's disease and polyarteritis nodosa/periarteritis nodosa), microscopic polyarteritis, immunovasculitis, CNS vasculitis, cutaneous vasculitis, hypersensitivity vasculitis, necrotizing vasculitis such as systemic necrotizing vasculitis, and ANCA-associated vasculitis, such as Churg-Strauss vasculitis or syndrome (CSS) and ANCA-associated small-vessel vasculitis, temporal arteritis, autoimmune aplastic anemia, Coombs positive anemia, Diamond Blackfan anemia, hemolytic anemia or immune hemolytic anemia including autoimmune hemolytic anemia (AIHA), pernicious anemia (anemia perniciosa), Addison's disease, pure red cell anemia or aplasia (PRCA), Factor VIII deficiency, hemophilia A, autoimmune neutropenia, pancytopenia, leukopenia, diseases involving leukocyte diapedesis, CNS inflammatory disorders, multiple organ injury syndrome such as those secondary to septicemia, trauma or hemorrhage, antigen-antibody complex-mediated diseases, anti-glomerular basement membrane disease, anti-phospholipid antibody syndrome, allergic neuritis, Behcet's disease/syndrome, Castleman's syndrome, Goodpasture's syndrome, Reynaud's syndrome, Sjogren's syndrome, Stevens-Johnson syndrome, pemphigoid such as pemphigoid bullous and skin pemphigoid, pemphigus (including pemphigus vulgaris, pemphigus foliaceus, pemphigus mucus-membrane pemphigoid, and pemphigus erythematosus), autoimmune polyendocrinopathies, Reiter's disease or syndrome, an immune complex disorder such as immune complex nephritis, antibody-mediated nephritis, polyneuropathies, chronic neuropathy such as IgM polyneuropathies or IgM-mediated neuropathy, and autoimmune or immune-mediated thrombocytopenia such as idiopathic thrombocytopenic purpura (ITP) including chronic or acute ITP, scleritis such as idiopathic cerato-scleritis, episcleritis, autoimmune disease of the testis and ovary including autoimmune orchitis and oophoritis, primary hypothyroidism, hypoparathyroidism, autoimmune endocrine diseases including thyroiditis such as autoimmune thyroiditis, Hashimoto's disease, chronic thyroiditis (Hashimoto's thyroiditis), or subacute thyroiditis, idiopathic hypothyroidism, Grave's disease, polyglandular syndromes such as autoimmune polyglandular syndromes (or polyglandular endocrinopathy syndromes), paraneoplastic syndromes, including neurologic paraneoplastic syndromes such as Lambert-Eaton myasthenic syndrome or Eaton-Lambert syndrome, stiff-man or stiff-person syndrome, encephalomyelitis such as allergic encephalomyelitis or encephalomyelitis allergica and experimental allergic encephalomyelitis (EAE), myasthenia gravis such as thymoma-associated myasthenia gravis, cerebellar degeneration, neuromyotonia, opsoclonus or opsoclonus myoclonus syndrome (OMS), and sensory neuropathy, multifocal motor neuropathy, Sheehan's syndrome, autoimmune hepatitis, lupoid hepatitis, giant-cell hepatitis, autoimmune chronic active hepatitis, lymphoid interstitial pneumonitis (LIP), bronchiolitis obliterans (non-transplant) vs NSIP, Guillain-Barre syndrome, Berger's disease (IgA nephropathy), idiopathic IgA nephropathy, linear IgA dermatosis, acute febrile neutrophilic dermatosis, subcorneal pustular dermatosis, transient acantholytic dermatosis, cirrhosis such as primary biliary cirrhosis and pneumonocirrhosis, autoimmune enteropathy syndrome, Celiac or Coeliac disease, celiac sprue (gluten enteropathy), refractory sprue, idiopathic sprue, cryoglobulinemia, amylotrophic lateral sclerosis (ALS; Lou Gehrig's disease), coronary artery disease, autoimmune ear disease such as autoimmune inner ear disease (AIED), autoimmune hearing loss, polychondritis such as refractory or relapsed or relapsing polychondritis, pulmonary alveolar proteinosis, Cogan's syndrome/nonsyphilitic interstitial keratitis, Bell's palsy, Sweet's disease/syndrome, rosacea autoimmune, zoster-associated pain, amyloidosis, a non-cancerous lymphocytosis, a primary lymphocytosis, which includes monoclonal B cell lymphocytosis (e.g., benign monoclonal gammopathy and monoclonal gammopathy of undetermined significance, MGUS), peripheral neuropathy, paraneoplastic syndrome, channelopathies including channelopathies of the CNS, autism, inflammatory myopathy, focal or segmental or focal segmental glomerulosclerosis (FSGS), endocrine opthalmopathy, uveoretinitis, chorioretinitis, autoimmune hepatological disorder, fibromyalgia, multiple endocrine failure, Schmidt's syndrome, adrenalitis, gastric atrophy, presenile dementia, demyelinating diseases such as autoimmune demyelinating diseases and chronic inflammatory demyelinating polyneuropathy, Dressler's syndrome, alopecia areata, alopecia totalis, CREST syndrome (calcinosis, Raynaud's phenomenon, esophageal dysmotility, sclerodactyly, and telangiectasia), male and female autoimmune infertility, e.g., due to anti-spermatozoan antibodies, mixed connective tissue disease, Chagas' disease, rheumatic fever, recurrent abortion, farmer's lung, erythema multiforme, post-cardiotomy syndrome, Cushing's syndrome, bird-fancier's lung, allergic granulomatous angiitis, benign lymphocytic angiitis, Alport's syndrome, alveolitis such as allergic alveolitis and fibrosing alveolitis, interstitial lung disease, transfusion reaction, Sampter's syndrome, Caplan's syndrome, endocarditis, endomyocardial fibrosis, diffuse interstitial pulmonary fibrosis, interstitial lung fibrosis, pulmonary fibrosis, idiopathic pulmonary fibrosis, cystic fibrosis, endophthalmitis, erythema elevatum et diutinum, erythroblastosis fetalis, eosinophilic faciitis, Shulman's syndrome, Felty's syndrome, cyclitis such as chronic cyclitis, heterochronic cyclitis, iridocyclitis (acute or chronic), or Fuch's cyclitis, Henoch-Schonlein purpura, SCID, sepsis, endotoxemia, post-vaccination syndromes, Evan's syndrome, autoimmune gonadal failure, Sydenham's chorea, post-streptococcal nephritis, thromboangitis ubiterans, thyrotoxicosis, tabes dorsalis, chorioiditis, giant-cell polymyalgia, chronic hypersensitivity pneumonitis, keratoconjunctivitis sicca, idiopathic nephritic syndrome, minimal change nephropathy, benign familial and ischemia-reperfusion injury, transplant organ reperfusion, retinal autoimmunity, aphthae, aphthous stomatitis, arteriosclerotic disorders, aspermiogenesis, autoimmune hemolysis, Boeck's disease, enteritis allergica, erythema nodosum leprosum, idiopathic facial paralysis, chronic fatigue syndrome, febris rheumatica, Hamman-Rich's disease, sensoneural hearing loss, ileitis regionalis, leucopenia, transverse myelitis, primary idiopathic myxedema, ophthalmia symphatica, polyradiculitis acuta, pyoderma gangrenosum, acquired splenic atrophy, vitiligo, toxic-shock syndrome, conditions involving infiltration of T cells, leukocyte-adhesion deficiency, immune responses associated with acute and delayed hypersensitivity mediated by cytokines and T-lymphocytes, diseases involving leukocyte diapedesis, multiple organ injury syndrome, antigen-antibody complex-mediated diseases, antiglomerular basement membrane disease, allergic neuritis, autoimmune polyendocrinopathies, oophoritis, primary myxedema, autoimmune atrophic gastritis, rheumatic diseases, mixed connective tissue disease, nephrotic syndrome, insulitis, polyendocrine failure, autoimmune polyglandular syndrome type I, adult-onset idiopathic hypoparathyroidism (AOIH), myocarditis, nephrotic syndrome, primary sclerosing cholangitis, acute or chronic sinusitis, ethmoid, frontal, maxillary, or sphenoid sinusitis, an eosinophil-related disorder such as eosinophilia, pulmonary infiltration eosinophilia, eosinophilia-myalgia syndrome, Loffler's syndrome, chronic eosinophilic pneumonia, tropical pulmonary eosinophilia, granulomas containing eosinophils, seronegative spondyloarthritides, polyendocrine autoimmune disease, sclerosing cholangitis, sclera, episclera, Bruton's syndrome, transient hypogammaglobulinemia of infancy, Wiskott-Aldrich syndrome, ataxia telangiectasia syndrome, angiectasis, autoimmune disorders associated with collagen disease, rheumatism, allergic hypersensitivity disorders, glomerulonephritides, reperfusion injury, ischemic re-perfusion disorder, lymphomatous tracheobronchitis, inflammatory dermatoses, dermatoses with acute inflammatory components, and autoimmune uveoretinitis (AUR).

[0835] For convenience, the meaning of some terms and phrases used in the specification, examples, and appended claims, are provided below. Unless stated otherwise, or implicit from context, the following terms and phrases include the meanings provided below. The definitions are provided to aid in describing particular embodiments, and are not intended to limit the claimed invention, because the scope of the invention is limited only by the claims. Unless otherwise defined, all technical and scientific terms used herein have the same meaning as commonly understood by one of ordinary skill in the art to which this invention belongs. If there is an apparent discrepancy between the usage of a term in the art and its definition provided herein, the definition provided within the specification shall prevail.

[0836] For convenience, certain terms employed herein, in the specification, examples and appended claims are collected here.

[0837] The terms “decrease”, “reduced”, “reduction”, or “inhibit” are all used herein to mean a decrease by a statistically significant amount. In some embodiments, “reduce,” “reduction” or “decrease” or “inhibit” typically means a decrease by at least 10% as compared to a reference level (e.g. the absence of a given treatment or agent) and can include, for example, a decrease by at least about 10%, at least about 20%, at least about 25%, at least about 30%, at least about 35%, at least about 40%, at least about 45%, at least about 50%, at least about 55%, at least about 60%, at least about 65%, at least about 70%, at least about 75%, at least about 80%, at least about 85%, at least about 90%, at least about 95%, at least about 98%, at least about 99%, or more. As used herein, “reduction” or “inhibition” does not encompass a complete inhibition or reduction as compared to a reference level. “Complete inhibition” is a 100% inhibition as compared to a reference level. A decrease can be preferably down to a level accepted as within the range of normal, e.g., for an individual without a given disorder.

[0838] The terms “increased”, “increase”, “enhance”, or “activate” are all used herein to mean an increase by a statically significant amount. In some embodiments, the terms “increased”, “increase”, “enhance”, or “activate” can mean an increase of at least 10% as compared to a reference level, for example an increase of at least about 20%, or at least about 30%, or at least about 40%, or at least about 50%, or at least about 60%, or at least about 70%, or at least about 80%, or at least about 90% or up to and including a 100% increase or any increase between 10-100% as compared to a reference level, or at least about a 2-fold, or at least about a 3-fold, or at least about a 4-fold, or at least about a 5-fold or at least about a 10-fold increase, or any increase between 2-fold and 10-fold or greater as compared to a reference level. In the context of a marker or symptom, an “increase” is a statistically significant increase in such level.

[0839] As used herein, a “subject” means a human or animal. Usually the animal is a vertebrate such as a primate, rodent, domestic animal or game animal. Primates include chimpanzees, cynomolgus monkeys, spider monkeys, and macaques, e.g., Rhesus. Rodents include mice, rats, woodchucks, ferrets, rabbits and hamsters. Domestic and game animals include cows, horses, pigs, deer, bison, buffalo, feline species, e.g., domestic cat, canine species, e.g., dog, fox, wolf, avian species, e.g., chicken, emu, ostrich, and fish, e.g., trout, catfish and salmon. In some embodiments, the subject is a mammal, e.g., a primate, e.g., a human. The terms, “individual,” “patient” and “subject” are used interchangeably herein.

[0840] Preferably, the subject is a mammal. The mammal can be a human, non-human primate, mouse, rat, dog, cat, horse, or cow, but is not limited to these examples. Mammals other than humans can be advantageously used as subjects that represent animal models of cancer. A subject can be male or female.

[0841] A subject can be one who has been previously diagnosed with or identified as suffering from or having a condition in need of treatment (e.g. cancer) or one or more complications related to such a condition, and optionally, have already undergone treatment for the disease or disorder (e.g., cancer) or the one or more complications related to the disease or disorder (e.g., cancer). Alternatively, a subject can also be one who has not been previously diagnosed as having the disease or disorder (e.g., cancer) or one or more complications related to the disease or disorder (e.g., cancer). For example, a subject can be one who exhibits one or more risk factors for the disease or disorder (e.g., cancer) or one or more complications related to the disease or disorder (e.g., cancer) or a subject who does not exhibit risk factors.

[0842] A “subject in need” of treatment for a particular condition can be a subject having that condition, diagnosed as having that condition, or at risk of developing that condition.

[0843] As used herein, the terms “protein” and “polypeptide” are used interchangeably to designate a series of amino acid residues, connected to each other by peptide bonds between the alpha-amino and carboxy groups of adjacent residues. The terms “protein”, and “polypeptide” refer to a polymer of amino acids, including modified amino acids (e.g., phosphorylated, glycated, glycosylated, etc.) and amino acid analogs, regardless of its size or function. “Protein” and “polypeptide” are often used in reference to relatively large polypeptides, whereas the term “peptide” is often used in reference to small polypeptides, but usage of these terms in the art overlaps. The terms “protein” and “polypeptide” are used interchangeably herein when referring to a gene product and fragments thereof. Thus, exemplary polypeptides or proteins include gene products, naturally occurring proteins, homologs, orthologs, paralogs, fragments and other equivalents, variants, fragments, and analogs of the foregoing.

[0844] In the various embodiments described herein, it is further contemplated that variants (naturally occurring or otherwise), alleles, homologs, conservatively modified variants, and/or conservative substitution variants of any of the particular polypeptides described are encompassed. As to amino acid sequences, one of skill will recognize that individual substitutions, deletions or additions to a nucleic acid, peptide, polypeptide, or protein sequence which alters a single amino acid or a small percentage of amino acids in the encoded sequence is a “conservatively modified variant” where the alteration results in the substitution of an amino acid with a chemically similar amino acid and retains the desired activity of the polypeptide. Such conservatively modified variants are in addition to and do not exclude polymorphic variants, interspecies homologs, and alleles consistent with the disclosure.

[0845] A given amino acid can be replaced by a residue having similar physiochemical characteristics, e.g., substituting one aliphatic residue for another (such as Ile, Val, Leu, or Ala for one another), or substitution of one polar residue for another (such as between Lys and Arg; Glu and Asp; or Gin and Asn). Other such conservative substitutions, e.g., substitutions of entire regions having similar hydrophobicity characteristics, are well known. Polypeptides comprising conservative amino acid substitutions can be tested in any one of the assays described herein to confirm that a desired activity, e.g. function and specificity of a native or reference polypeptide is retained.

[0846] Amino acids can be grouped according to similarities in the properties of their side chains (in A. L. Lehninger, in Biochemistry, second ed., pp. 73-75, Worth Publishers, New York (1975)): (1) non-polar: Ala (A), Val (V), Leu (L), Ile (I), Pro (P), Phe (F), Trp (W), Met (M); (2) uncharged polar: Gly (G), Ser (S), Thr (T), Cys (C), Tyr (Y), Asn (N), Gln (Q); (3) acidic: Asp (D), Glu (E); (4) basic: Lys (K), Arg (R), His (H). Alternatively, naturally occurring residues can be divided into groups based on common side-chain properties: (1) hydrophobic: Norleucine, Met, Ala, Val, Leu, Ile; (2) neutral hydrophilic: Cys, Ser, Thr, Asn, Gln; (3) acidic: Asp, Glu; (4) basic: His, Lys, Arg; (5) residues that influence chain orientation: Gly, Pro; (6) aromatic: Trp, Tyr, Phe. Non-conservative substitutions will entail exchanging a member of one of these classes for another class. Particular conservative substitutions include, for example; Ala into Gly or into Ser; Arg into Lys; Asn into Gln or into His; Asp into Glu; Cys into Ser; Gln into Asn; Glu into Asp; Gly into Ala or into Pro; His into Asn or into Gln; Ile into Leu or into Val; Leu into Ile or into Val; Lys into Arg, into Gln or into Glu; Met into Leu, into Tyr or into Ile; Phe into Met, into Leu or into Tyr; Ser into Thr; Thr into Ser; Trp into Tyr; Tyr into Trp; and/or Phe into Val, into Ile or into Leu.

[0847] In some embodiments, the polypeptide described herein (or a nucleic acid encoding such a polypeptide) can be a functional fragment of one of the amino acid sequences described herein. As used herein, a “functional fragment” is a fragment or segment of a peptide which retains at least 50% of the wild-type reference polypeptide's activity according to the assays described below herein. A functional fragment can comprise conservative substitutions of the sequences disclosed herein. In some embodiments of any of the aspects, a polypeptide can comprise the first N-terminal amino acid methionine. In embodiments where a polypeptide does not comprise a first N-terminal methionine, it is understood that a variant of the polypeptide does comprise a first N-terminal methionine.

[0848] In some embodiments, the polypeptide described herein can be a variant of a sequence described herein. In some embodiments, the variant is a conservatively modified variant. Conservative substitution variants can be obtained by mutations of native nucleotide sequences, for example. A “variant,” as referred to herein, is a polypeptide substantially homologous to a native or reference polypeptide, but which has an amino acid sequence different from that of the native or reference polypeptide because of one or a plurality of deletions, insertions or substitutions. Variant polypeptide-encoding DNA sequences encompass sequences that comprise one or more additions, deletions, or substitutions of nucleotides when compared to a native or reference DNA sequence, but that encode a variant protein or fragment thereof that retains activity. A wide variety of PCR-based site-specific mutagenesis approaches are known in the art and can be applied by the ordinarily skilled artisan.

[0849] A variant amino acid or DNA sequence can be at least 70%, at least 75%, at least 80%, at least 85%, at least 90%, at least 91%, at least 92%, at least 93%, at least 94%, at least 95%, at least 96%, at least 97%, at least 98%, at least 99%, or more, identical to a native or reference sequence. The degree of homology (percent identity) between a native and a mutant sequence can be determined, for example, by comparing the two sequences using freely available computer programs commonly employed for this purpose on the world wide web (e.g. BLASTp or BLASTn with default settings).

[0850] Alterations of the native amino acid sequence can be accomplished by any of a number of techniques known to one of skill in the art. Mutations can be introduced, for example, at particular loci by synthesizing oligonucleotides containing a mutant sequence, flanked by restriction sites enabling ligation to fragments of the native sequence. Following ligation, the resulting reconstructed sequence encodes an analog having the desired amino acid insertion, substitution, or deletion. Alternatively, oligonucleotide-directed site-specific mutagenesis procedures can be employed to provide an altered nucleotide sequence having particular codons altered according to the substitution, deletion, or insertion required. Techniques for making such alterations are very well established and include, for example, those disclosed by Walder et al. (Gene 42:133, 1986); Bauer et al. (Gene 37:73, 1985); Craik (BioTechniques, January 1985, 12-19); Smith et al. (Genetic Engineering: Principles and Methods, Plenum Press, 1981); and U.S. Pat. Nos. 4,518,584 and 4,737,462, which are herein incorporated by reference in their entireties. Any cysteine residue not involved in maintaining the proper conformation of the polypeptide also can be substituted, generally with serine, to improve the oxidative stability of the molecule and prevent aberrant crosslinking. Conversely, cysteine bond(s) can be added to the polypeptide to improve its stability or facilitate oligomerization.

[0851] As used herein, the term “nucleic acid” or “nucleic acid sequence” refers to any molecule, preferably a polymeric molecule, incorporating units of ribonucleic acid, deoxyribonucleic acid or an analog thereof. The nucleic acid can be either single-stranded or double-stranded. A single-stranded nucleic acid can be one nucleic acid strand of a denatured double-stranded DNA. Alternatively, it can be a single-stranded nucleic acid not derived from any double-stranded DNA. In one aspect, the nucleic acid can be DNA. In another aspect, the nucleic acid can be RNA. Suitable DNA can include, e.g., genomic DNA, cDNA, or vector DNA. Suitable RNA can include, e.g., mRNA.

[0852] The term “expression” refers to the cellular processes involved in producing RNA and proteins and as appropriate, secreting proteins, including where applicable, but not limited to, for example, transcription, transcript processing, translation and protein folding, modification and processing. Expression can refer to the transcription and stable accumulation of sense (e.g., mRNA) or antisense RNA derived from a nucleic acid fragment or fragments and/or to the translation of mRNA into a polypeptide.

[0853] As used herein, the term “detecting” or “measuring” refers to observing a signal from, e.g. a probe, label, or target molecule to indicate the presence of an analyte in a sample. Any method known in the art for detecting a particular label moiety can be used for detection. Exemplary detection methods include, but are not limited to, spectroscopic, fluorescent, photochemical, biochemical, immunochemical, electrical, optical or chemical methods. In some embodiments of any of the aspects, measuring can be a quantitative observation.

[0854] In some embodiments of any of the aspects, a polypeptide, nucleic acid, or cell as described herein can be engineered. As used herein, “engineered” refers to the aspect of having been manipulated by the hand of man. For example, a polypeptide is considered to be “engineered” when at least one aspect of the polypeptide, e.g., its sequence, has been manipulated by the hand of man to differ from the aspect as it exists in nature. As is common practice and is understood by those in the art, progeny of an engineered cell are typically still referred to as “engineered” even though the actual manipulation was performed on a prior entity.

[0855] In some embodiments of any of the aspects, the CAR polypeptides described herein is exogenous. In some embodiments of any of the aspects, the CAR polypeptides described herein is ectopic. In some embodiments of any of the aspects, the CAR polypeptides described herein is not endogenous.

[0856] The term “exogenous” refers to a substance present in a cell other than its native source. The term “exogenous” when used herein can refer to a nucleic acid (e.g. a nucleic acid encoding a polypeptide) or a polypeptide that has been introduced by a process involving the hand of man into a biological system such as a cell or organism in which it is not normally found and one wishes to introduce the nucleic acid or polypeptide into such a cell or organism. Alternatively, “exogenous” can refer to a nucleic acid or a polypeptide that has been introduced by a process involving the hand of man into a biological system such as a cell or organism in which it is found in relatively low amounts and one wishes to increase the amount of the nucleic acid or polypeptide in the cell or organism, e.g., to create ectopic expression or levels. In contrast, the term “endogenous” refers to a substance that is native to the biological system or cell. As used herein, “ectopic” refers to a substance that is found in an unusual location and/or amount. An ectopic substance can be one that is normally found in a given cell, but at a much lower amount and/or at a different time. Ectopic also includes substance, such as a polypeptide or nucleic acid that is not naturally found or expressed in a given cell in its natural environment.

[0857] As described herein, an “antigen” is a molecule that is bound by a binding site on an antibody agent (e.g., extracellular binding domain). Typically, antigens are bound by antibody ligands and are capable of raising an antibody response in vivo. An antigen can be a polypeptide, protein, nucleic acid or other molecule or portion thereof. The term “antigenic determinant” refers to an epitope on the antigen recognized by an antigen-binding molecule, and more particularly, by the antigen-binding site of said molecule.

[0858] In some embodiments, a nucleic acid encoding a polypeptide as described herein (e.g. a CAR polypeptide) is comprised by a vector. In some of the aspects described herein, a nucleic acid sequence encoding a given polypeptide as described herein, or any module thereof, is operably linked to a vector. The term “vector”, as used herein, refers to a nucleic acid construct designed for delivery to a host cell or for transfer between different host cells. As used herein, a vector can be viral or non-viral. The term “vector” encompasses any genetic element that is capable of replication when associated with the proper control elements and that can transfer gene sequences to cells. A vector can include, but is not limited to, a cloning vector, an expression vector, a plasmid, phage, transposon, cosmid, chromosome, virus, virion, etc.

[0859] In some embodiments of any of the aspects, the vector is recombinant, e.g., it comprises sequences originating from at least two different sources. In some embodiments of any of the aspects, the vector comprises sequences originating from at least two different species. In some embodiments of any of the aspects, the vector comprises sequences originating from at least two different genes, e.g., it comprises a fusion protein or a nucleic acid encoding an expression product which is operably linked to at least one non-native (e.g., heterologous) genetic control element (e.g., a promoter, suppressor, activator, enhancer, response element, or the like).

[0860] As used herein, the term “expression vector” refers to a vector that directs expression of an RNA or polypeptide from sequences linked to transcriptional regulatory sequences on the vector. The sequences expressed will often, but not necessarily, be heterologous to the cell. An expression vector may comprise additional elements, for example, the expression vector may have two replication systems, thus allowing it to be maintained in two organisms, for example in human cells for expression and in a prokaryotic host for cloning and amplification.

[0861] As used herein, the term “viral vector” refers to a nucleic acid vector construct that includes at least one element of viral origin and has the capacity to be packaged into a viral vector particle. The viral vector can contain the nucleic acid encoding a polypeptide as described herein in place of non-essential viral genes. The vector and/or particle may be utilized for the purpose of transferring any nucleic acids into cells either in vitro or in vivo. Numerous forms of viral vectors are known in the art. Non-limiting examples of a viral vector of this invention include an AAV vector, an adenovirus vector, a lentivirus vector, a retrovirus vector, a herpesvirus vector, an alphavirus vector, a poxvirus vector a baculovirus vector, and a chimeric virus vector.

[0862] It should be understood that the vectors described herein can, in some embodiments, be combined with other suitable compositions and therapies. In some embodiments, the vector is episomal. The use of a suitable episomal vector provides a means of maintaining the nucleotide of interest in the subject in high copy number extra chromosomal DNA thereby eliminating potential effects of chromosomal integration.

[0863] As used herein, the terms “treat,” “treatment,” “treating,” or “amelioration” refer to therapeutic treatments, wherein the object is to reverse, alleviate, ameliorate, inhibit, slow down or stop the progression or severity of a condition associated with a disease or disorder, e.g. cancer. The term “treating” includes reducing or alleviating at least one adverse effect or symptom of a condition, disease or disorder associated with a the disease or disorder (e.g., cancer). Treatment is generally “effective” if one or more symptoms or clinical markers are reduced. Alternatively, treatment is “effective” if the progression of a disease is reduced or halted. That is, “treatment” includes not just the improvement of symptoms or markers, but also a cessation of, or at least slowing of, progress or worsening of symptoms compared to what would be expected in the absence of treatment. Beneficial or desired clinical results include, but are not limited to, alleviation of one or more symptom(s), diminishment of extent of disease, stabilized (i.e., not worsening) state of disease, delay or slowing of disease progression, amelioration or palliation of the disease state, remission (whether partial or total), and/or decreased mortality, whether detectable or undetectable. The term “treatment” of a disease also includes providing relief from the symptoms or side-effects of the disease (including palliative treatment).

[0864] As used herein, the term “pharmaceutical composition” refers to the active agent in combination with a pharmaceutically acceptable carrier e.g. a carrier commonly used in the pharmaceutical industry. The phrase “pharmaceutically acceptable” is employed herein to refer to those compounds, materials, compositions, and/or dosage forms which are, within the scope of sound medical judgment, suitable for use in contact with the tissues of human beings and animals without excessive toxicity, irritation, allergic response, or other problem or complication, commensurate with a reasonable benefit/risk ratio. In some embodiments of any of the aspects, a pharmaceutically acceptable carrier can be a carrier other than water. In some embodiments of any of the aspects, a pharmaceutically acceptable carrier can be a cream, emulsion, gel, liposome, nanoparticle, and/or ointment. In some embodiments of any of the aspects, a pharmaceutically acceptable carrier can be an artificial or engineered carrier, e.g., a carrier that the active ingredient would not be found to occur in or within nature.

[0865] As used herein, the term “administering,” refers to the placement of a compound as disclosed herein into a subject by a method or route which results in at least partial delivery of the agent at a desired site. Pharmaceutical compositions comprising the compounds disclosed herein can be administered by any appropriate route which results in an effective treatment in the subject. In some embodiments, administration comprises physical human activity, e.g., an injection, act of ingestion, an act of application, and/or manipulation of a delivery device or machine. Such activity can be performed, e.g., by a medical professional and/or the subject being treated.

[0866] As used herein, “contacting” refers to any suitable means for delivering, or exposing, an agent to at least one cell. Exemplary delivery methods include, but are not limited to, direct delivery to cell culture medium, transfection, transduction, perfusion, injection, or other delivery method known to one skilled in the art. In some embodiments, contacting comprises physical human activity, e.g., an injection; an act of dispensing, mixing, and/or decanting; and/or manipulation of a delivery device or machine.

[0867] As used herein, the term “analog” refers to a substance that shares one or more particular structural features, elements, components, or moieties with a reference substance. Typically, an “analog” shows significant structural similarity with the reference substance, for example sharing a core or consensus structure, but also differs in certain discrete ways. In some embodiments, an analog is a substance that can be generated from the reference substance, e.g., by chemical manipulation of the reference substance.

[0868] The term “statistically significant” or “significantly” refers to statistical significance and generally means a two standard deviation (2SD) or greater difference.

[0869] Other than in the operating examples, or where otherwise indicated, all numbers expressing quantities of ingredients or reaction conditions used herein should be understood as modified in all instances by the term “about.” The term “about” when used in connection with percentages can mean±1%.

[0870] As used herein, the term “comprising” means that other elements can also be present in addition to the defined elements presented. The use of “comprising” indicates inclusion rather than limitation.

[0871] The term “consisting of” refers to compositions, methods, and respective components thereof as described herein, which are exclusive of any element not recited in that description of the embodiment.

[0872] As used herein the term “consisting essentially of” refers to those elements required for a given embodiment. The term permits the presence of additional elements that do not materially affect the basic and novel or functional characteristic(s) of that embodiment of the invention.

[0873] As used herein, the term “corresponding to” refers to an amino acid or nucleotide at the enumerated position in a first polypeptide or nucleic acid, or an amino acid or nucleotide that is equivalent to an enumerated amino acid or nucleotide in a second polypeptide or nucleic acid. Equivalent enumerated amino acids or nucleotides can be determined by alignment of candidate sequences using degree of homology programs known in the art, e.g., BLAST.

[0874] As used herein, the term “specific binding” refers to a chemical interaction between two molecules, compounds, cells and/or particles wherein the first entity binds to the second, target entity with greater specificity and affinity than it binds to a third entity which is a non-target. In some embodiments, specific binding can refer to an affinity of the first entity for the second target entity which is at least 10 times, at least 50 times, at least 100 times, at least 500 times, at least 1000 times or greater than the affinity for the third non-target entity. A reagent specific for a given target is one that exhibits specific binding for that target under the conditions of the assay being utilized.

[0875] The singular terms “a,” “an,” and “the” include plural referents unless context clearly indicates otherwise. Similarly, the word “or” is intended to include “and” unless the context clearly indicates otherwise. Although methods and materials similar or equivalent to those described herein can be used in the practice or testing of this disclosure, suitable methods and materials are described below. The abbreviation, “e.g.” is derived from the Latin exempli gratia, and is used herein to indicate a non-limiting example. Thus, the abbreviation “e.g.” is synonymous with the term “for example.”

[0876] Groupings of alternative elements or embodiments of the invention disclosed herein are not to be construed as limitations. Each group member can be referred to and claimed individually or in any combination with other members of the group or other elements found herein. One or more members of a group can be included in, or deleted from, a group for reasons of convenience and/or patentability. When any such inclusion or deletion occurs, the specification is herein deemed to contain the group as modified thus fulfilling the written description of all Markush groups used in the appended claims.

[0877] Unless otherwise defined herein, scientific and technical terms used in connection with the present application shall have the meanings that are commonly understood by those of ordinary skill in the art to which this disclosure belongs. It should be understood that this invention is not limited to the particular methodology, protocols, and reagents, etc., described herein and as such can vary. The terminology used herein is for the purpose of describing particular embodiments only, and is not intended to limit the scope of the present invention, which is defined solely by the claims. Definitions of common terms in immunology and molecular biology can be found in The Merck Manual of Diagnosis and Therapy, 20th Edition, published by Merck Sharp & Dohme Corp., 2018 (ISBN 0911910190, 978-0911910421); Robert S. Porter et al. (eds.), The Encyclopedia of Molecular Cell Biology and Molecular Medicine, published by Blackwell Science Ltd., 1999-2012 (ISBN 9783527600908); and Robert A. Meyers (ed.), Molecular Biology and Biotechnology: a Comprehensive Desk Reference, published by VCH Publishers, Inc., 1995 (ISBN 1-56081-569-8); Immunology by Werner Luttmann, published by Elsevier, 2006; Janeway's Immunobiology, Kenneth Murphy, Allan Mowat, Casey Weaver (eds.), W. W. Norton & Company, 2016 (ISBN 0815345054, 978-0815345053); Lewin's Genes XI, published by Jones & Bartlett Publishers, 2014 (ISBN-1449659055); Michael Richard Green and Joseph Sambrook, Molecular Cloning: A Laboratory Manual, 4th ed., Cold Spring Harbor Laboratory Press, Cold Spring Harbor, N.Y., USA (2012) (ISBN 1936113414); Davis et al., Basic Methods in Molecular Biology, Elsevier Science Publishing, Inc., New York, USA (2012) (ISBN 044460149X); Laboratory Methods in Enzymology: DNA, Jon Lorsch (ed.) Elsevier, 2013 (ISBN 0124199542); Current Protocols in Molecular Biology (CPMB), Frederick M. Ausubel (ed.), John Wiley and Sons, 2014 (ISBN 047150338X, 9780471503385), Current Protocols in Protein Science (CPPS), John E. Coligan (ed.), John Wiley and Sons, Inc., 2005; and Current Protocols in Immunology (CPI) (John E. Coligan, ADA M Kruisbeek, David H Margulies, Ethan M Shevach, Warren Strobe, (eds.) John Wiley and Sons, Inc., 2003 (ISBN 0471142735, 9780471142737), the contents of which are all incorporated by reference herein in their entireties.

[0878] One of skill in the art can readily identify a chemotherapeutic agent of use (e.g. see Physicians' Cancer Chemotherapy Drug Manual 2014, Edward Chu, Vincent T. DeVita Jr., Jones & Bartlett Learning; Principles of Cancer Therapy, Chapter 85 in Harrison's Principles of Internal Medicine, 18th edition; Therapeutic Targeting of Cancer Cells: Era of Molecularly Targeted Agents and Cancer Pharmacology, Chs. 28-29 in Abeloff's Clinical Oncology, 2013 Elsevier; and Fischer D S (ed): The Cancer Chemotherapy Handbook, 4th ed. St. Louis, Mosby-Year Book, 2003).

[0879] In some embodiments of any of the aspects, the disclosure described herein does not concern a process for cloning human beings, processes for modifying the germ line genetic identity of human beings, uses of human embryos for industrial or commercial purposes or processes for modifying the genetic identity of animals which are likely to cause them suffering without any substantial medical benefit to man or animal, and also animals resulting from such processes.

[0880] Other terms are defined herein within the description of the various aspects of the invention.

[0881] All patents and other publications; including literature references, issued patents, published patent applications, and co-pending patent applications; cited throughout this application are expressly incorporated herein by reference for the purpose of describing and disclosing, for example, the methodologies described in such publications that might be used in connection with the technology described herein. These publications are provided solely for their disclosure prior to the filing date of the present application. Nothing in this regard should be construed as an admission that the inventors are not entitled to antedate such disclosure by virtue of prior invention or for any other reason. All statements as to the date or representation as to the contents of these documents is based on the information available to the applicants and does not constitute any admission as to the correctness of the dates or contents of these documents.

[0882] The description of embodiments of the disclosure is not intended to be exhaustive or to limit the disclosure to the precise form disclosed. While specific embodiments of, and examples for, the disclosure are described herein for illustrative purposes, various equivalent modifications are possible within the scope of the disclosure, as those skilled in the relevant art will recognize. For example, while method steps or functions are presented in a given order, alternative embodiments may perform functions in a different order, or functions may be performed substantially concurrently. The teachings of the disclosure provided herein can be applied to other procedures or methods as appropriate. The various embodiments described herein can be combined to provide further embodiments. Aspects of the disclosure can be modified, if necessary, to employ the compositions, functions and concepts of the above references and application to provide yet further embodiments of the disclosure. Moreover, due to biological functional equivalency considerations, some changes can be made in protein structure without affecting the biological or chemical action in kind or amount. These and other changes can be made to the disclosure in light of the detailed description. All such modifications are intended to be included within the scope of the appended claims.

[0883] Specific elements of any of the foregoing embodiments can be combined or substituted for elements in other embodiments. Furthermore, while advantages associated with certain embodiments of the disclosure have been described in the context of these embodiments, other embodiments may also exhibit such advantages, and not all embodiments need necessarily exhibit such advantages to fall within the scope of the disclosure.

[0884] The technology described herein is further illustrated by the following examples which in no way should be construed as being further limiting.

[0885] Some embodiments of the technology described herein can be defined according to any of the following numbered paragraphs:
[0886] 1. A polypeptide comprising:
   [0887] a. an extracellular binding domain;
   [0888] b. a transmembrane domain;
   [0889] c. at least one intracellular signaling domain; and
   [0890] d. a repressible protease.
[0891] 2. The polypeptide of paragraph 1, wherein the repressible protease is located:
   [0892] a. between the transmembrane domain and the first intracellular signaling domain;
   [0893] b. between the first intracellular signaling domain and the second intracellular signaling domain; or
   [0894] c. between the second intracellular signaling domain and the third intracellular signaling domain.
[0895] 3. The polypeptide of paragraph 1 or 2, wherein the repressible protease is hepatitis C virus (HCV) nonstructural protein 3 (NS3).
[0896] 4. The polypeptide of any one of paragraphs 1-3, further comprising a cofactor for the repressible protease.
[0897] 5. The polypeptide of paragraph 4, wherein the cofactor is an HSV NS4A domain.
[0898] 6. The polypeptide of paragraph 5, wherein the HSV NS4A domain is adjacent and N-terminal to the repressible protease.
[0899] 7. The polypeptide of any one of paragraphs 1-6, further comprising at least one protease cleavage site of the repressible protease.
[0900] 8. The polypeptide of any one of paragraphs 1-7, wherein the repressible protease and the at least one protease cleavage site are physically linked to one another.
[0901] 9. The polypeptide of any one of paragraphs 1-8, wherein the at least one protease cleavage site is located:
   [0902] a. between the transmembrane domain and the first intracellular signaling domain;
   [0903] b. between the first intracellular signaling domain and the second intracellular signaling domain; and/or
   [0904] c. between the second intracellular signaling domain and the third intracellular signaling domain.
[0905] 10. The polypeptide of paragraph 1-9, wherein the polypeptide is cleaved when a protease inhibitor is not bound to the repressible protease.
[0906] 11. The polypeptide of any one of paragraphs 1-10, wherein the N-terminal amino acid of the cleaved polypeptide is associated with a high degradation rate and a low half-life.
[0907] 12. The polypeptide of any one of paragraphs 1-11, in combination with a protease inhibitor bound to the repressible protease.
[0908] 13. The polypeptide of any one of paragraphs 1-12, wherein the protease inhibitor is selected from grazoprevir (GZV), danoprevir, simeprevir, asunaprevir, ciluprevir, boceprevir, sovaprevir, paritaprevir, ombitasvir, paritaprevir, ritonavir, dasabuvir, and telaprevir.
[0909] 14. The polypeptide of paragraph 1-13, wherein the polypeptide is not cleaved when the protease inhibitor is bound to the repressible protease.
[0910] 15. The polypeptide of any one of paragraphs 1-14 comprising from the N-terminus to the C-terminus:
   [0911] a. an extracellular binding domain;
   [0912] b. a transmembrane domain;
   [0913] c. at least one intracellular signaling domain;
   [0914] d. a first protease cleavage site;
   [0915] e. a repressible protease;
   [0916] f. a second protease cleavage site; and
   [0917] g. at least one intracellular signaling domain.
[0918] 16. The polypeptide of any one of paragraphs 1-15 comprising from the N-terminus to the C-terminus:
   [0919] a. an extracellular binding domain;
   [0920] b. a transmembrane domain;
   [0921] c. a first intracellular signaling domain;
   [0922] d. a second intracellular signaling domain;
   [0923] e. a first protease cleavage site;
   [0924] f. a repressible protease;
   [0925] g. a second protease cleavage site; and
   [0926] h. a third intracellular signaling domain.
[0927] 17. The polypeptide of any one of paragraphs 1-16 comprising from the N-terminus to the C-terminus:
   [0928] a. an extracellular binding domain;
   [0929] b. a transmembrane domain;
   [0930] c. a first intracellular signaling domain;
   [0931] d. a first protease cleavage site;
   [0932] e. a repressible protease;
   [0933] f. a second protease cleavage site;
   [0934] g. a second intracellular signaling domain; and
   [0935] h. a third intracellular signaling domain.
[0936] 18. The polypeptide of any one of paragraphs 1-17 comprising from the N-terminus to the C-terminus:
   [0937] a. an extracellular binding domain;
   [0938] b. a transmembrane domain;
   [0939] c. a first protease cleavage site;
   [0940] d. a repressible protease;
   [0941] e. a second protease cleavage site; and
   [0942] f. at least one intracellular signaling domain.
[0943] 19. The polypeptide of any one of paragraphs 1-18 comprising from the N-terminus to the C-terminus:
   [0944] a. an extracellular binding domain;
   [0945] b. a transmembrane domain;
   [0946] c. a first protease cleavage site;
   [0947] d. a repressible protease;
   [0948] e. a second protease cleavage site;
   [0949] f. a first intracellular signaling domain;
   [0950] g. a second intracellular signaling domain; and
   [0951] h. a third intracellular signaling domain.
[0952] 20. The polypeptide of any one of paragraphs 1-19, wherein the at least one intracellular signaling domain comprises first and second intracellular signaling domains.
[0953] 21. The polypeptide of any one of paragraphs 1-20, wherein the at least one intracellular signaling domain comprises first, second, and third intracellular signaling domains.
[0954] 22. The polypeptide of any one of paragraphs 1-2 1, wherein each of the at least one intracellular signaling domains independently comprises an intracellular signaling domain selected from the group consisting of: TCRC; FcRy; FcRp; CD3zeta; CD3y; CD35; CD3s; CD3C; CD22; CD79a; CD79b; CD66d; CARD11; CD2; CD7; CD27; CD28; CD30; CD40; CD54 (ICAM); CD83; CD134 (OX40); CD137 (4-1BB); CD150 (SLAMF1); CD152 (CTLA4); CD223 (LAG3); CD270 (HVEM); CD273 (PD-L2); CD274 (PD-Ll); CD278 (ICOS); DAP10; LAT; KD2C SLP76; TRIM; ZAP70; and 41BB.
[0955] 23. The polypeptide of any one of paragraphs 1-22, wherein the first, second, and third intracellular signaling domains comprise the intracellular signaling domains of CD28, 4-1BB, and CD3zeta, respectively.
[0956] 24. The polypeptide of any one of paragraphs 1-23, wherein the transmembrane domain is located between the extracellular binding domain and the at least one intracellular signaling domain.
[0957] 25. The polypeptide of any one of paragraphs 1-24, wherein the transmembrane domain comprises the transmembrane domain of CD28.
[0958] 26. The polypeptide of any one of paragraphs 1-25, wherein the extracellular binding domain is an antibody, an antigen-binding fragment thereof, a F(ab) fragment, a F(ab′) fragment, a single chain variable fragment (scFv), or a single-domain antibody (sdAb).
[0959] 27. The polypeptide of any one of paragraphs 1-26, wherein the extracellular binding domain comprises a scFv.
[0960] 28. The polypeptide of any one of paragraphs 1-27, wherein the extracellular binding domain specifically binds to a tumor antigen.
[0961] 29. The polypeptide of any one of paragraphs 1-28, further comprising a leading peptide located N-terminal to the extracellular binding domain.
[0962] 30. The polypeptide of paragraph 29, wherein the leading peptide is a CD8alpha leading peptide.
[0963] 31. The polypeptide of any one of paragraphs 1-30, further comprising a spacer domain located between the extracellular binding domain and the transmembrane domain.
[0964] 32. The polypeptide of paragraph 31, wherein the spacer domain comprises a CD8 hinge domain.
[0965] 33. The polypeptide of any one of paragraphs 1-32, further comprising a first detectable marker adjacent to and C terminal of the extracellular binding domain.
[0966] 34. The polypeptide of any one of paragraphs 1-33, further comprising a second detectable marker adjacent and N-terminal to the repressible protease.
[0967] 35. The polypeptide of any one of paragraphs 1-34, further comprising a third detectable marker adjacent to and C-terminal to the repressible protease.
[0968] 36. The polypeptide of any one of paragraphs 33-35, wherein the first, second, or third detectable marker is selected from GFP, V5, HA1, Myc, VSV-G, HSV, FLAG, HIS, mCherry, AU1, and biotin.
[0969] 37. The polypeptide of any of paragraphs 1-36, wherein the polypeptide comprises one of SEQ ID NO: 34-36 or a sequence that is at least 70% identical to one of SEQ ID NO: 34-36 that maintains the same function.
[0970] 38. A polypeptide comprising:
   [0971] a. an extracellular binding domain;
   [0972] b. a transmembrane domain;
   [0973] c. a repressible protease; and
   [0974] d. at least one intracellular signaling domain.
[0975] 39. The polypeptide of paragraph 38, wherein the repressible protease is hepatitis C virus (HCV) nonstructural protein 3 (NS3).
[0976] 40. The polypeptide of any one of paragraphs 38-39, further comprising a cofactor for the repressible protease.
[0977] 41. The polypeptide of paragraph 40, wherein the cofactor is an HSV NS4A domain.
[0978] 42. The polypeptide of paragraph 41, wherein the HSV NS4A domain is adjacent and N-terminal to the repressible protease.
[0979] 43. The polypeptide of any one of paragraphs 38-42, further comprising at least one protease cleavage site of the repressible protease.
[0980] 44. The polypeptide of any one of paragraphs 38-43, wherein the repressible protease and the at least one protease cleavage site are physically linked to one another.
[0981] 45. The polypeptide of any one of paragraphs 38-44, wherein the repressible protease and at least one protease cleavage site are located in between the transmembrane domain and the intracellular signalling domain.
[0982] 46. The polypeptide of any one of paragraphs 38-45 wherein the polypeptide is cleaved when a protease inhibitor is not bound to the repressible protease.
[0983] 47. The polypeptide of any one of paragraphs 38-46, wherein the N-terminal amino acid of the cleaved polypeptide is associated with a high degradation rate and a low half-life.
[0984] 48. The polypeptide of any one of paragraphs 38-47, in combination with a protease inhibitor bound to the repressible protease.
[0985] 49. The polypeptide of any one of paragraphs 38-48, wherein the protease inhibitor is selected from grazoprevir (GZV), danoprevir, simeprevir, asunaprevir, ciluprevir, boceprevir, sovaprevir, paritaprevir, ombitasvir, paritaprevir, ritonavir, dasabuvir, and telaprevir.
[0986] 50. The polypeptide of any one of paragraphs 38-49, wherein the polypeptide is not degraded when the protease inhibitor is bound to the repressible protease.
[0987] 51. The polypeptide of any one of paragraphs 38-50, comprising from the N-terminus to the C-terminus:
   [0988] a. an extracellular binding domain;
   [0989] b. a transmembrane domain;
   [0990] c. a first protease cleavage site;
   [0991] d. a repressible protease;
   [0992] e. a second protease cleavage site; and
   [0993] f. a single intracellular signaling domain.
[0994] 52. The polypeptide of any one of paragraphs 38-51, wherein the extracellular binding domain is an antibody, an antigen-binding fragment thereof, a F(ab) fragment, a F(ab′) fragment, a single chain variable fragment (scFv), or a single-domain antibody (sdAb).
[0995] 53. The polypeptide of any one of paragraphs 38-52, wherein the extracellular binding domain comprises a scFv.
[0996] 54. The polypeptide of any one of paragraphs 38-53, wherein the extracellular binding domain specifically binds to a tumor antigen.
[0997] 55. The polypeptide of any one of paragraphs 38-54, wherein the transmembrane domain is located between the extracellular binding domain and the intracellular signaling domain.
[0998] 56. The polypeptide of any one of paragraphs 38-55, wherein the intracellular signaling domain comprises the intracellular signaling domain selected from TCRC; FcRy; FcRp; CD3zeta; CD3y; CD35; CD3s; CD3C; CD22; CD79a; CD79b; CD66d; CARD11; CD2; CD7; CD27; CD28; CD30; CD40; CD54 (ICAM); CD83; CD134 (OX40); CD137 (4-1BB); CD150 (SLAMF1); CD152 (CTLA4); CD223 (LAG3); CD270 (HVEM); CD273 (PD-L2); CD274 (PD-Ll); CD278 (ICOS); DAP10; LAT; KD2C SLP76; TRIM; ZAP70; and 41BB.
[0999] 57. The polypeptide of any one of paragraphs 38-56, wherein the intracellular signaling domain comprises the intracellular signaling domain of CD3zeta.
[1000] 58. The polypeptide of any one of paragraphs 38-57, further comprising a leading peptide located N-terminal to the extracellular binding domain.
[1001] 59. The polypeptide of paragraph 58, wherein the leading peptide is a CD8alpha leading peptide.
[1002] 60. The polypeptide of any one of paragraphs 38-59, further comprising a spacer domain located between the extracellular binding domain and the transmembrane domain.
[1003] 61. The polypeptide of paragraph 60, wherein the spacer domain comprises a CD8 hinge domain.
[1004] 62. The polypeptide of any one of paragraphs 38-61, further comprising a first detectable marker adjacent to and C terminal of the extracellular binding domain.
[1005] 63. The polypeptide of any one of paragraphs 38-62, further comprising a second detectable marker adjacent and N terminal to the repressible protease.
[1006] 64. The polypeptide of any one of paragraphs 38-63, further comprising a third detectable marker adjacent to and C terminal to the repressible protease.
[1007] 65. The polypeptide of any one of paragraphs 62-64, wherein the first, second, or third detectable marker is selected from GFP, V5, HA1, Myc, VSV-G, HSV, FLAG, HIS, AU1, mCherry, and biotin.
[1008] 66. The polypeptide of any one of paragraphs 38-65, wherein the polypeptide comprises SEQ ID NO: 38 or a sequence that is at least 70% identical to SEQ ID NO: 38 that maintains the same function.
[1009] 67. A polypeptide comprising:
   [1010] a. an extracellular binding domain;
   [1011] b. a transmembrane domain;
   [1012] c. at least one intracellular signaling domain; and
   [1013] d. a degron domain.
[1014] 68. The polypeptide of paragraph 67, wherein the degron domain comprises a dihydrofolate reductase (DHFR) degron (DD) or a ligand-induced degradation (LID) domain.
[1015] 69. The polypeptide of any one of paragraphs 67-68, in combination with a degron stabilizer bound to the degron domain.
[1016] 70. The polypeptide of any one of paragraphs 67-69, wherein the degron is DHFR degron and the degron stabilizer is trimethoprim (TMP) or an analog thereof.
[1017] 71. The polypeptide of any one of paragraphs 67-70, in combination with a degron destabilizer bound to the degron domain.
[1018] 72. The polypeptide of any one of paragraphs 67-71, wherein the degron is a ligand-induced degradation (LID) domain and the degron destabilizer is Shield-1 or an analog thereof.
[1019] 73. The polypeptide of any one of paragraphs 67-72, wherein the polypeptide is not degraded when the degron stabilizer is bound to the degron domain.
[1020] 74. The polypeptide of any one of paragraphs 67-73, wherein the polypeptide is degraded when the degron destabilizer is bound to the degron domain.
[1021] 75. The polypeptide of any one of paragraphs 67-74, comprising from the N-terminus to the C-terminus:
   [1022] a. an extracellular binding domain;
   [1023] b. a transmembrane domain;
   [1024] c. at least one intracellular signaling domain; and
   [1025] d. a degron domain.
[1026] 76. The polypeptide of any one of paragraphs 67-75 wherein the extracellular binding domain is an antibody, an antigen-binding fragment thereof, a F(ab) fragment, a F(ab′) fragment, a single chain variable fragment (scFv), or a single-domain antibody (sdAb).
[1027] 77. The polypeptide of any one of paragraphs 67-76, wherein the extracellular binding domain comprises a scFv.
[1028] 78. The polypeptide of any one of paragraphs 67-77, wherein the extracellular binding domain specifically binds to a tumor antigen.
[1029] 79. The polypeptide of any one of paragraphs 67-78, wherein the transmembrane domain is located between the extracellular binding domain and the at least one intracellular signaling domain.
[1030] 80. The polypeptide of any one of paragraphs 67-79, wherein each of the at least one intracellular signaling domains independently comprises an intracellular signaling domain selected from the group consisting of: TCRC; FcRy; FcRp; CD3zeta; CD3y; CD35; CD3s; CD3C; CD22; CD79a; CD79b; CD66d; CARD11; CD2; CD7; CD27; CD28; CD30; CD40; CD54 (ICAM); CD83; CD134 (OX40); CD137 (4-1BB); CD150 (SLAMF1); CD152 (CTLA4); CD223 (LAG3); CD270 (HVEM); CD273 (PD-L2); CD274 (PD-Ll); CD278 (ICOS); DAP10; LAT; KD2C SLP76; TRIM; ZAP70; and 41BB.
[1031] 81. The polypeptide of any one of paragraphs 67-80, wherein the intracellular signaling domain comprises the intracellular signaling domain of CD28 and/or 4-1BB.
[1032] 82. The polypeptide of any one of paragraphs 67-81, further comprising a leading peptide located N-terminal to the extracellular binding domain.
[1033] 83. The polypeptide of paragraph 82, wherein the leading peptide is a CD8alpha leading peptide.
[1034] 84. The polypeptide of any one of paragraphs 67-83, further comprising a spacer domain located between the extracellular binding domain and the transmembrane domain.
[1035] 85. The polypeptide of paragraph 84, wherein the spacer domain comprises a CD8 hinge domain.
[1036] 86. The polypeptide of any one of paragraphs 67-85, further comprising a detectable marker adjacent to and C terminal of the extracellular binding domain.
[1037] 87. The polypeptide of paragraph 86, wherein the detectable marker is selected from GFP, V5, HA1, Myc, VSV-G, HSV, FLAG, HIS, AU1, mCherry, and biotin.
[1038] 88. The polypeptide of any one of paragraphs 67-87, wherein the polypeptide comprises SEQ ID NO: 39 or a sequence that is at least 70% identical to SEQ ID NO: 39 that maintains the same function.
[1039] 89. A system comprising a first polypeptide of any one of paragraphs 38-66 and a second polypeptide of any one of paragraphs 67-88.
[1040] 90. The system of paragraph 89, wherein the system is functional only in the presence of the protease inhibitor and the degron stabilizer.
[1041] 91. The system of paragraph 89, wherein the system is functional only in the presence of the protease inhibitor and the absence of the degron destabilizer.
[1042] 92. The system of any one of paragraphs 89-9 1, wherein the first polypeptide comprises a signaling domain.
[1043] 93. The system of paragraph 92, wherein the signaling domain comprises the signaling domain of CD3zeta.
[1044] 94. The system of any one of paragraphs 89-93, wherein the second polypeptide comprises a co-stimulatory signaling domain.
[1045] 95. The system of paragraph 94, wherein the co-stimulatory signaling domain comprises the co-stimulatory signaling domain of CD28 and/or 4-1BB.
[1046] 96. The system of any one of paragraphs 89-95, wherein the first polypeptide and second polypeptide are physically linked to one another.
[1047] 97. The system of any one of paragraphs 89-96, wherein the first polypeptide and second polypeptide flank a self-cleaving peptide domain.
[1048] 98. A polypeptide comprising:
   [1049] a. an extracellular binding domain;
   [1050] b. a transmembrane domain; and
   [1051] c. a peptide domain.
[1052] 99. The polypeptide of paragraph 98, wherein the peptide domain is specifically bound by a repressible protease.
[1053] 100. The polypeptide of any one of paragraphs 98-99, wherein the peptide domain is specifically bound by NS3.
[1054] 101. The polypeptide of any one of paragraphs 98-100, comprising from the N-terminus to the C-terminus:
   [1055] a. an extracellular binding domain;
   [1056] b. a transmembrane domain; and
   [1057] c. a peptide domain.
[1058] 102. The polypeptide of any one of paragraphs 98-101, comprising from the N-terminus to the C-terminus:
   [1059] a. an extracellular binding domain;
   [1060] b. a transmembrane domain;
   [1061] c. at least one intracellular signaling domain; and
   [1062] d. a peptide domain.
[1063] 103. The polypeptide of any one of paragraphs 98-102, comprising from the N-terminus to the C-terminus:
   [1064] a. an extracellular binding domain;
   [1065] b. a transmembrane domain;
   [1066] c. a single intracellular signaling domain; and
   [1067] d. a peptide domain.
[1068] 104. The polypeptide of any one of paragraphs 98-103, comprising from the N-terminus to the C-terminus:
   [1069] a. an extracellular binding domain;
   [1070] b. a transmembrane domain;
   [1071] c. a first intracellular signaling domain;
   [1072] d. a second intracellular signaling domain; and
   [1073] e. a peptide domain.
[1074] 105. The polypeptide of any one of paragraphs 98-104, wherein the extracellular binding domain is an antibody, an antigen-binding fragment thereof, a F(ab) fragment, a F(ab′) fragment, a single chain variable fragment (scFv), or a single-domain antibody (sdAb).
[1075] 106. The polypeptide of any one of paragraphs 98-105, wherein the extracellular binding domain comprises a scFv.
[1076] 107. The polypeptide of any one of paragraphs 98-106, wherein the extracellular binding domain specifically binds to a tumor antigen.
[1077] 108. The polypeptide of any one of paragraphs 98-107, wherein the transmembrane domain is located between the extracellular binding domain and the peptide domain.
[1078] 109. The polypeptide of any one of paragraphs 98-108, further comprising at least one intracellular signaling domain.
[1079] 110. The polypeptide of paragraph 109, wherein each of the at least one intracellular signaling domains independently comprises an intracellular signaling domain selected from the group consisting of: TCRC; FcRy; FcRp; CD3zeta; CD3y; CD35; CD3s; CD3C; CD22; CD79a; CD79b; CD66d; CARD11; CD2; CD7; CD27; CD28; CD30; CD40; CD54 (ICAM); CD83; CD134 (OX40); CD137 (4-1BB); CD150 (SLAMF1); CD152 (CTLA4); CD223 (LAG3); CD270 (HVEM); CD273 (PD-L2); CD274 (PD-Ll); CD278 (ICOS); DAP10; LAT; KD2C SLP76; TRIM; ZAP70; and 41BB.
[1080] 111. The polypeptide of any one of paragraphs 98-110, wherein the at least one intracellular signaling domain comprises the intracellular signaling domain of CD28 and/or 4-1BB.
[1081] 112. The polypeptide of any one of paragraphs 98-111, further comprising a leading peptide located N-terminal to the extracellular binding domain.
[1082] 113. The polypeptide of paragraph 112, wherein the leading peptide is a CD8alpha leading peptide.
[1083] 114. The polypeptide of any one of paragraphs 98-113, further comprising a spacer domain located between the extracellular binding domain and the transmembrane domain.
[1084] 115. The polypeptide of paragraph 114, wherein the spacer domain comprises a CD8 hinge domain.
[1085] 116. The polypeptide of any one of paragraphs 98-115, further comprising a detectable marker adjacent to and C terminal of the extracellular binding domain.
[1086] 117. The polypeptide of paragraph 116, wherein the detectable marker is selected from GFP, V5, HA1, Myc, VSV-G, HSV, FLAG, HIS, AU1, mCherry, and biotin.
[1087] 118. The polypeptide of any one of paragraphs 98-117, wherein the polypeptide comprises SEQ ID NO: 84, SEQ ID NO: 85, or a sequence that is at least 70% identical to SEQ ID NO: 84 or SEQ ID NO: 85 that maintains the same function.
[1088] 119. A polypeptide comprising:
   [1089] a. an extracellular domain;
   [1090] b. a transmembrane domain;
   [1091] c. a repressible protease; and
   [1092] d. at least one intracellular signaling domain.
[1093] 120. The polypeptide of paragraph 119, wherein the repressible protease is hepatitis C virus (HCV) nonstructural protein 3 (NS3).
[1094] 121. The polypeptide of any one of paragraphs 119-120, wherein the NS3 is catalytically dead.
[1095] 122. The polypeptide of any one of paragraphs 119-121, wherein the polypeptide does not comprise any protease cleavage sites.
[1096] 123. The polypeptide of any one of paragraphs 119-122, wherein the repressible protease is located:
   [1097] a. between the transmembrane domain and the at least one intracellular signaling domain;
   [1098] b. between the first intracellular signaling domain and the second intracellular signaling domain; or
   [1099] c. at the C terminus of the polypeptide.
[1100] 124. The polypeptide of any one of paragraphs 119-123, in combination with a protease inhibitor bound to the repressible protease.
[1101] 125. The polypeptide of any one of paragraphs 119-124, wherein the protease inhibitor is selected from grazoprevir (GZV), danoprevir, simeprevir, asunaprevir, ciluprevir, boceprevir, sovaprevir, paritaprevir, ombitasvir, paritaprevir, ritonavir, dasabuvir, and telaprevir.
[1102] 126. The polypeptide of any one of paragraphs 119-125, further comprising a cofactor for the repressible protease.
[1103] 127. The polypeptide of any one of paragraphs 119-126, wherein the cofactor is an HSV NS4A domain.
[1104] 128. The polypeptide of paragraph 127, wherein the HSV NS4A domain is adjacent and N-terminal to the repressible protease.
[1105] 129. The polypeptide of any one of paragraphs 119-128, comprising from the N-terminus to the C-terminus:
   [1106] a. an extracellular domain;
   [1107] b. a transmembrane domain;
   [1108] c. at least one intracellular signaling domain;
   [1109] d. a repressible protease; and
   [1110] e. at least one intracellular signaling domain.
[1111] 130. The polypeptide of any one of paragraphs 119-129, comprising from the N-terminus to the C-terminus:
   [1112] a. an extracellular domain;
   [1113] b. a transmembrane domain;
   [1114] c. a first intracellular signaling domain;
   [1115] d. a repressible protease; and
   [1116] e. a second intracellular signaling domain.
[1117] 131. The polypeptide of any one of paragraphs 119-130, comprising from the N-terminus to the C-terminus:
   [1118] a. an extracellular domain;
   [1119] b. a transmembrane domain;
   [1120] c. at least one intracellular signaling domain; and
   [1121] d. a repressible protease.
[1122] 132. The polypeptide of any one of paragraphs 119-131, comprising from the N-terminus to the C-terminus:
   [1123] a. an extracellular domain;
   [1124] b. a transmembrane domain;
   [1125] c. a first intracellular signaling domain;
   [1126] d. a second intracellular signaling domain; and
   [1127] e. a repressible protease.
[1128] 133. The polypeptide of any one of paragraphs 119-132, comprising from the N-terminus to the C-terminus:
   [1129] a. an extracellular domain;
   [1130] b. a transmembrane domain;
   [1131] c. a single intracellular signaling domain; and
   [1132] d. a repressible protease.
[1133] 134. The polypeptide of any one of paragraphs 119-133, comprising from the N-terminus to the C-terminus:
   [1134] a. an extracellular domain;
   [1135] b. a transmembrane domain;
   [1136] c. a repressible protease; and
   [1137] d. at least one intracellular signaling domain.
[1138] 135. The polypeptide of any one of paragraphs 119-134, comprising from the N-terminus to the C-terminus:
   [1139] a. an extracellular domain;
   [1140] b. a transmembrane domain;
   [1141] c. a repressible protease; and
   [1142] d. a single intracellular signaling domain.
[1143] 136. The polypeptide of any one of paragraphs 119-135, wherein the extracellular domain comprises the extracellular domain of DAP10.
[1144] 137. The polypeptide of any one of paragraphs 119-136, wherein the transmembrane domain comprises the transmembrane domain of CD8.
[1145] 138. The polypeptide of any one of paragraphs 119-137, wherein each of the at least one intracellular signaling domains independently comprises an intracellular signaling domain selected from the group consisting of: TCRC; FcRy; FcRp; CD3zeta; CD3y; CD35; CD3s; CD3C; CD22; CD79a; CD79b; CD66d; CARD11; CD2; CD7; CD27; CD28; CD30; CD40; CD54 (ICAM); CD83; CD134 (OX40); CD137 (4-1BB); CD150 (SLAMF1); CD152 (CTLA4); CD223 (LAG3); CD270 (HVEM); CD273 (PD-L2); CD274 (PD-Ll); CD278 (ICOS); DAP10; LAT; KD2C SLP76; TRIM; ZAP70; and 41BB.
[1146] 139. The polypeptide of any one of paragraphs 119-138, wherein the at least one intracellular signaling domain comprises the intracellular signaling domain of 4-1BB and/or CD3zeta.
[1147] 140. The polypeptide of any one of paragraphs 119-139, further comprising at least one detectable marker at the C-terminal end of the polypeptide.
[1148] 141. The polypeptide of paragraph 140, wherein the detectable marker is selected from GFP, V5, HA1, Myc, VSV-G, HSV, FLAG, HIS, AU1, mCherry, and biotin.
[1149] 142. The polypeptide of any one of paragraphs 119-141, wherein the polypeptide comprises one of SEQ ID NOs: 86-89 or a sequence that is at least 70% identical to one of SEQ ID NOs: 86-89 that maintains the same function.
[1150] 143. A system comprising a first polypeptide of any one of paragraphs 98-118 and a second polypeptide of any one of paragraphs 119-142.
[1151] 144. The system of paragraph 143, wherein the second polypeptide specifically binds to the first polypeptide.
[1152] 145. The system of any one of paragraphs 143-144, in combination with a protease inhibitor bound to the repressible protease of the second polypeptide.
[1153] 146. The system of any one of paragraphs 143-145, wherein the protease inhibitor is selected from grazoprevir (GZV), danoprevir, simeprevir, asunaprevir, ciluprevir, boceprevir, sovaprevir, paritaprevir, ombitasvir, paritaprevir, ritonavir, dasabuvir, and telaprevir.
[1154] 147. The system of any one of paragraphs 143-146, wherein the second polypeptide does not specifically bind the first polypeptide in the presence of the protease inhibitor.
[1155] 148. The system of any one of paragraphs 143-147, wherein the first polypeptide comprises a co-stimulatory signaling domain.
[1156] 149. The system of paragraph 148, wherein the co-stimulatory signaling domain comprises the co-stimulatory signaling domain of CD28 and/or 4-1BB.
[1157] 150. The system of any one of paragraphs 143-149, wherein the second polypeptide comprises a signaling domain.
[1158] 151. The system of paragraph 150, wherein the signaling domain comprises the signaling domain of CD3zeta.
[1159] 152. The system of any one of paragraphs 143-151, wherein the first polypeptide and second polypeptide are physically linked to one another.
[1160] 153. The system of any one of paragraphs 143-152, wherein the first polypeptide and second polypeptide flank a self-cleaving peptide domain.
[1161] 154. The system of any one of paragraphs 143-153, wherein the system comprises one of SEQ ID NOs: 114-121 or a sequence that is at least 70% identical to one of SEQ ID NOs: 114-121 that maintains the same function.
[1162] 155. A polypeptide comprising:
   [1163] a. an extracellular binding domain;
   [1164] b. a transmembrane domain; and
   [1165] c. a reader domain.
[1166] 156. The polypeptide of paragraph 155, wherein the reader domain specifically binds to a repressible protease in the presence of a specific protease inhibitor.
[1167] 157. The polypeptide of paragraph 155 or 156, wherein the reader domain is a danoprevir/NS3 complex reader domain (DNCR) or a grazoprevir/NS3 reader complex (GNCR) domain.
[1168] 158. The polypeptide of any one of paragraphs 155-157, comprising from the N-terminus to the C-terminus:
   [1169] a. an extracellular binding domain;
   [1170] b. a transmembrane domain;
   [1171] c. a first intracellular signaling domain;
   [1172] d. a second intracellular signaling domain; and
   [1173] e. a reader domain.
[1174] 159. The polypeptide of any one of paragraphs 155-158, comprising from the N-terminus to the C-terminus:
   [1175] a. an extracellular binding domain;
   [1176] b. a transmembrane domain;
   [1177] c. a single intracellular signaling domain; and
   [1178] d. and a reader domain.
[1179] 160. The polypeptide of any one of paragraphs 157-159, further comprising at least one intracellular signaling domain.
[1180] 161. The polypeptide of any one of paragraphs 157-160, wherein each of the at least one intracellular signaling domains independently comprises an intracellular signaling domain selected from the group consisting of: TCRC; FcRy; FcRp; CD3zeta; CD3y; CD35; CD3s; CD3C; CD22; CD79a; CD79b; CD66d; CARD11; CD2; CD7; CD27; CD28; CD30; CD40; CD54 (ICAM); CD83; CD134 (OX40); CD137 (4-1BB); CD150 (SLAMF1); CD152 (CTLA4); CD223 (LAG3); CD270 (HVEM); CD273 (PD-L2); CD274 (PD-Ll); CD278 (ICOS); DAP10; LAT; KD2C SLP76; TRIM; ZAP70; and 41BB.
[1181] 162. The polypeptide of any one of paragraphs 157-161, wherein the at least one intracellular signaling domain comprises an intracellular signaling domain of CD28, and/or 4-1BB.
[1182] 163. The polypeptide of any one of paragraphs 157-162, wherein the transmembrane domain is located between the extracellular binding domain and the at least one intracellular signaling domain.
[1183] 164. The polypeptide of any one of paragraphs 157-163, wherein the transmembrane domain comprises the transmembrane domain of CD28.
[1184] 165. The polypeptide of any one of paragraphs 157-164, wherein the extracellular binding domain is an antibody, an antigen-binding fragment thereof, a F(ab) fragment, a F(ab′) fragment, a single chain variable fragment (scFv), or a single-domain antibody (sdAb).
[1185] 166. The polypeptide of any one of paragraphs 157-165, wherein the extracellular binding domain comprises a scFv.
[1186] 167. The polypeptide of any one of paragraphs 157-166, wherein the extracellular binding domain specifically binds to a tumor antigen.
[1187] 168. The polypeptide of any one of paragraphs 157-167, further comprising a leading peptide located N-terminal to the extracellular binding domain.
[1188] 169. The polypeptide of paragraph 168, wherein the leading peptide is a CD8alpha leading peptide.
[1189] 170. The polypeptide of any one of paragraphs 157-169, further comprising a spacer domain located between the extracellular binding domain and the transmembrane domain.
[1190] 171. The polypeptide of paragraph 170, wherein the spacer domain comprises a CD8 hinge domain.
[1191] 172. The polypeptide of any one of paragraphs 157-171, further comprising a detectable marker adjacent to and C terminal of the extracellular binding domain.
[1192] 173. The polypeptide of paragraph 172, wherein the detectable marker is selected from GFP, V5, HA1, Myc, VSV-G, HSV, FLAG, HIS, and biotin.
[1193] 174. The polypeptide of any of paragraphs 157-173, wherein the polypeptide comprises residues 1-626 of SEQ ID NO: 90, residues 1-668 of SEQ ID NO: 91, residues 1-630 of SEQ ID NO: 92, residues 1-672 of SEQ ID NO: 93, residues 1-626 of SEQ ID NO: 127, residues 1-630 of SEQ ID NO: 128, or a sequence that is at least 70% identical to residues 1-626 of SEQ ID NO: 90, residues 1-668 of SEQ ID NO: 91, residues 1-630 of SEQ ID NO: 92, residues 1-672 of SEQ ID NO: 93, residues 1-626 of SEQ ID NO: 127, or residues 1-630 of SEQ ID NO: 128, that maintains the same function.
[1194] 175. A polypeptide comprising:
   [1195] a. a repressible protease; and
   [1196] b. at least one intracellular signaling domain.
[1197] 176. The polypeptide of paragraph 175, wherein the repressible protease is hepatitis C virus (HCV) nonstructural protein 3 (NS3).
[1198] 177. The polypeptide of any one of paragraphs 175-176, wherein the NS3 is catalytically dead.
[1199] 178. The polypeptide of any one of paragraphs 175-177, wherein the polypeptide does not comprise any protease cleavage sites.
[1200] 179. The polypeptide of any one of paragraphs 175-178, further comprising a cofactor for the repressible protease.
[1201] 180. The polypeptide of paragraph 179, wherein the cofactor is an HSV NS4A domain.
[1202] 181. The polypeptide of paragraph 180, wherein the HSV NS4A domain is adjacent and N-terminal to the repressible protease.
[1203] 182. The polypeptide of any one of paragraphs 175-181, in combination with a protease inhibitor bound to the repressible protease.
[1204] 183. The polypeptide of paragraph 182, wherein the protease inhibitor is selected from grazoprevir (GZV), danoprevir, simeprevir, asunaprevir, ciluprevir, boceprevir, sovaprevir, paritaprevir, ombitasvir, paritaprevir, ritonavir, dasabuvir, and telaprevir.
[1205] 184. The polypeptide of any one of paragraphs 175-183, comprising from the N-terminus to the C-terminus:
   [1206] a. an extracellular domain;
   [1207] b. a transmembrane domain;
   [1208] c. at least one intracellular signaling domain;
   [1209] d. a repressible protease; and
   [1210] e. at least one intracellular signaling domain.
[1211] 185. The polypeptide of any one of paragraphs 175-184, comprising from the N-terminus to the C-terminus:
   [1212] a. an extracellular domain;
   [1213] b. a transmembrane domain;
   [1214] c. a first intracellular signaling domain;
   [1215] d. a repressible protease; and
   [1216] e. a second intracellular signaling domain.
[1217] 186. The polypeptide of any one of paragraphs 175-185, further comprising an extracellular domain and a transmembrane domain.
[1218] 187. The polypeptide of any one of paragraphs 175-186, wherein the extracellular domain comprises the extracellular domain of DAP10.
[1219] 188. The polypeptide of any one of paragraphs 175-187, wherein the transmembrane domain comprises the transmembrane domain of CD8.
[1220] 189. The polypeptide of any one of paragraphs 175-188, wherein each of the at least one intracellular signaling domains independently comprises an intracellular signaling domain selected from the group consisting of: TCRC; FcRy; FcRp; CD3zeta; CD3y; CD35; CD3s; CD3C; CD22; CD79a; CD79b; CD66d; CARD11; CD2; CD7; CD27; CD28; CD30; CD40; CD54 (ICAM); CD83; CD134 (OX40); CD137 (4-1BB); CD150 (SLAMF1); CD152 (CTLA4); CD223 (LAG3); CD270 (HVEM); CD273 (PD-L2); CD274 (PD-Ll); CD278 (ICOS); DAP10; LAT; KD2C SLP76; TRIM; ZAP70; and 41BB.
[1221] 190. The polypeptide of any one of paragraphs 175-189, wherein the intracellular signaling domain is the intracellular signaling domain of 4-1BB and/or CD3zeta.
[1222] 191. The polypeptide of any one of paragraphs 175-190, further comprising at least one detectable marker at the C-terminal end of the polypeptide.
[1223] 192. The polypeptide of paragraph 191, wherein the detectable marker is selected from GFP, V5, HA1, Myc, VSV-G, HSV, FLAG, HIS, AU1, mCherry, and biotin.
[1224] 193. The polypeptide of any of paragraphs 175-192, wherein the polypeptide comprises one of SEQ ID NO: 86-89 or residues 648-1313 of SEQ ID NO: 90, residues 690-1355 of SEQ ID NO: 91, residues 652-1317 of SEQ ID NO: 92, residues 694-1359 of SEQ ID NO: 93, residues 648-1303 of SEQ ID NO: 127, or residues 652-1307 of SEQ ID NO: 128, or a sequence that is at least 70% identical to one of SEQ ID NO: 86-89 or residues 648-1313 of SEQ ID NO: 90, residues 690-1355 of SEQ ID NO: 91, residues 652-1317 of SEQ ID NO: 92, residues 694-1359 of SEQ ID NO: 93, residues 648-1303 of SEQ ID NO: 127, or residues 652-1307 of SEQ ID NO: 128 that maintains the same function.
[1225] 194. A system comprising a first polypeptide of any one of paragraphs 155-174 and a second polypeptide of any one of paragraphs 119-142 or 175-193.
[1226] 195. The system of paragraph 194, in combination with a protease inhibitor bound to the repressible protease of the second polypeptide.
[1227] 196. The system of paragraph 194 or 195, wherein the protease inhibitor is selected from grazoprevir (GZV), danoprevir, simeprevir, asunaprevir, ciluprevir, boceprevir, sovaprevir, paritaprevir, ombitasvir, paritaprevir, ritonavir, dasabuvir, and telaprevir.
[1228] 197. The system of any one of paragraphs 194-196, wherein the reader domain of the first polypeptide specifically binds to the repressible protease of the second polypeptide in the presence of a protease inhibitor; and/or the reader domain of the first polypeptide does not specifically bind to the repressible protease of the second polypeptide in the absence of the protease inhibitor specific to the reader domain.
[1229] 198. The system of any one of paragraphs 194-197, wherein the first polypeptide comprises a co-stimulatory signaling domain.
[1230] 199. The system of paragraph 198, wherein the co-stimulatory signaling domain comprises the co-stimulatory signaling domain of CD28 and/or 4-1BB.
[1231] 200. The system of any one of paragraphs 194-199, wherein the second polypeptide comprises a signaling domain.
[1232] 201. The system of paragraph 200, wherein the signaling domain comprises the signaling domain of CD3zeta.
[1233] 202. The system of any one of paragraphs 194-201, wherein the first polypeptide and second polypeptide are physically linked to one another.
[1234] 203. The system of any one of paragraphs 194-202, wherein the first polypeptide and second polypeptide flank a self-cleaving peptide domain.
[1235] 204. The polypeptide of any one of paragraphs 194-203, wherein the polypeptide comprises SEQ ID NOs: 89-93 or 127-128 or a sequence that is at least 70% identical to SEQ ID NOs: 89-93 or 127-128 that maintains the same function.
[1236] 205. A polynucleotide encoding the polypeptide or system of any one of paragraphs 1-204.
[1237] 206. The polynucleotide of paragraph 205, wherein the polynucleotide comprises one of SEQ ID NO: 1-6, 60-69, 106-113, 125-126, or a sequence that is at least 70% identical to one of SEQ ID NO: 1-6, 60-69, 106-113, 125-126 that maintains the same function.
[1238] 207. A vector comprising the polynucleotide of paragraph 205 or 206.
[1239] 208. The vector of paragraph 207, wherein the vector comprises one of SEQ ID NOs: 236-261 or a sequence that is at least 70% identical to one of SEQ ID NOs: 236-261 that maintains the same function.
[1240] 209. A cell or population thereof comprising the polypeptide or system of any one of paragraphs 1-204, the polynucleotide of any one of paragraphs 205-206, or the vector of any one of paragraphs 207-208.
[1241] 210. The cell of paragraph 209, wherein the cell comprises an immune cell.
[1242] 211. The cell of paragraph 210, wherein the immune cell comprises a CD4+ T cell, a CD8+ T cell, a regulatory T cell (Treg), or a natural killer (NK) cell.
[1243] 212. The cell of any one of paragraphs 209-211, wherein the cell is a CD4+ T cell comprising the polypeptide of paragraphs 15 or 17.
[1244] 213. The cell of any one of paragraphs 209-211, wherein the cell is a CD8+ T cell comprising the polypeptide of paragraphs 15 or 17.
[1245] 214. The cell of any one of paragraphs 209-211, wherein the cell is a Treg comprising the polypeptide of paragraphs 15, 17, 18, or 19.
[1246] 215. The cell of any one of paragraphs 209-211, wherein the cell is an NK cell comprising the polypeptide of paragraphs 18 or 19.
[1247] 216. The cell of any one of paragraphs 209-215, further comprising an inactivating modification of at least one HLA Class I gene in the cell.
[1248] 217. A pharmaceutical composition comprising the polypeptide or system of any one of paragraphs 1-204, the polynucleotide of any one of paragraphs 205-206, the vector of any one of paragraphs 207-208, or the cell of any one of paragraphs 216, and a pharmaceutically acceptable carrier.
[1249] 218. A method of decreasing the degradation of a polypeptide, comprising the steps of:
   [1250] a. providing a population of cells comprising the polypeptide of any one of paragraphs 1-37; and
   [1251] b. contacting the population of cells with an effective amount of a protease inhibitor.
[1252] 219. The method of paragraph 218, wherein the degradation is decreased by at least 10%, at least 20%, at least 30%, at least 40%, at least 50%, at least 60%, at least 70%, at least 80%, at least 90%, at least 100%, at least 200%, at least 300%, at least 400%, or at least 500% compared to prior to contacting with the protease inhibitor.
[1253] 220. The method of any one of paragraphs 218-219, wherein the decrease in degradation results in an increase of activity of the polypeptide of at least 10%, at least 20%, at least 30%, at least 40%, at least 50%, at least 60%, at least 70%, at least 80%, at least 90%, at least 100%, at least 200%, at least 300%, at least 400%, or at least 500% compared to prior to contacting with the protease inhibitor.
[1254] 221. The method of paragraph 220, wherein the increase of activity of the polypeptide comprises an increase in intracellular signaling of the intracellular signaling domains of the polypeptide.
[1255] 222. The method of paragraph 221, wherein the increase in intracellular signaling results in an increase of activation of the population of cells.
[1256] 223. The method of paragraph 223, wherein the activation of the population of cells comprises expression of activation markers comprising CD69 and/or expression of cytokines comprising IL-2 and IFNg.
[1257] 224. The method of any one of paragraphs 222-223, wherein an increase of activation of the population of cells results in an increased killing efficiency of a target cell.
[1258] 225. The method of any one of paragraphs 218-224, wherein the population of cells comprises immune cells.
[1259] 226. The method of paragraph 225, wherein the population of immune cells comprises CD4+ T cells, CD8+ T cells, Tregs, or NK cells.
[1260] 227. The method of any one of paragraphs 224-226, wherein the target cell expresses an antigen that binds to the extracellular binding domain of the polypeptide.
[1261] 228. A method of treating a subject in need of a cell-based therapy comprising the steps of:
   [1262] a. administering to the subject a population of cells comprising the polypeptide of any one of paragraphs 1-37; and
   [1263] b. administering to the subject an effective amount of a protease inhibitor.
[1264] 229. The method of paragraph 228, wherein the protease inhibitor is administered at the same time the population of cells is administered.
[1265] 230. The method of paragraph 228 or 229, wherein the protease inhibitor is administered after the population of cells is administered.
[1266] 231. The method of any one of paragraphs 228-230, wherein a withdrawal or decrease in concentration of the protease inhibitor results in increased degradation of the polypeptide.
[1267] 232. The method of any one of paragraphs 228-231, wherein a withdrawal or decrease in concentration of the protease inhibitor results in decreased activity of the polypeptide.
[1268] 233. The method of any one of paragraphs 228-232, wherein the subject has a cancer expressing an antigen that binds to the extracellular binding domain of the polypeptide.
[1269] 234. A method of decreasing the degradation of a polypeptide, comprising the steps of:
   [1270] a. providing a population of cells comprising the polypeptide or system of any one of paragraphs 38-97; and
   [1271] b. contacting the population of cells with an effective amount of a protease inhibitor and/or an effective amount of a degron stabilizer.
[1272] 235. The method of paragraph 234, wherein the degron is DHFR degron and the degron stabilizer is trimethoprim (TMP) or an analog thereof.
[1273] 236. The method of paragraph 234 or 235, wherein the degradation is decreased by at least 10%, at least 20%, at least 30%, at least 40%, at least 50%, at least 60%, at least 70%, at least 80%, at least 90%, at least 100%, at least 200%, at least 300%, at least 400%, or at least 500% compared to prior to contacting with the protease inhibitor and/or degron stabilizer.
[1274] 237. The method of any one of paragraphs 234-236, wherein the decrease in degradation results in an increase of activity of the polypeptide of at least 10%, at least 20%, at least 30%, at least 40%, at least 50%, at least 60%, at least 70%, at least 80%, at least 90%, at least 100%, at least 200%, at least 300%, at least 400%, or at least 500% compared to prior to contacting with the protease inhibitor and/or degron stabilizer.
[1275] 238. The method of paragraph 237, wherein the increase of activity of the polypeptide comprises an increase in intracellular signaling of the intracellular signaling domains of the polypeptide.
[1276] 239. The method of paragraph 238, wherein the increase in intracellular signaling results in an increase of activation of the population of cells.
[1277] 240. The method of paragraph 239, wherein the activation of the population of cells comprises expression of activation markers comprising CD69 and/or expression of cytokines comprising IL-2 and IFNg.
[1278] 241. The method of any one of paragraphs 239-240, wherein an increase of activation of the population of cells results in an increased killing efficiency of a target cell.
[1279] 242. The method of any one of paragraphs 234-24 1, wherein the population of cells comprises immune cells.
[1280] 243. The method of paragraph 242, wherein the population of immune cells comprises CD4+ T cells, CD8+ T cells, Tregs, or NK cells.
[1281] 244. The method of any one of paragraphs 241-243, wherein the target cell expresses an antigen that binds to the extracellular binding domain of the first polypeptide of the system and an antigen that binds to the extracellular binding domain of the second polypeptide of the system.
[1282] 245. A method of treating a subject in need of a cell-based therapy comprising the steps of:
   [1283] a. administering to the subject a population of cells comprising a polypeptide or system of any one of paragraphs 38-97; and
   [1284] b. administering to the subject an effective amount of a protease inhibitor and/or an effective amount of a degron stabilizer.
[1285] 246. The method of paragraph 245, wherein the degron is DHFR degron and the degron stabilizer is trimethoprim (TMP) or an analog thereof.
[1286] 247. The method of paragraph 245 or 246, wherein the protease inhibitor and/or degron stabilizer is administered at the same time the population of cells is administered.
[1287] 248. The method of any one of paragraphs 245-247, wherein the protease inhibitor and/or degron stabilizer is administered after the population of cells is administered.
[1288] 249. The method of any one of paragraphs 245-248, wherein a withdrawal or decrease in concentration of the protease inhibitor and/or degron stabilizer results in increased degradation of the polypeptide.
[1289] 250. The method of any one of paragraphs 245-249, wherein a withdrawal or decrease in concentration of the protease inhibitor and/or degron stabilizer results in decreased activity of the polypeptide.
[1290] 251. The method of any one of paragraphs 245-250, wherein the subject has a cancer expressing an antigen that binds to the extracellular binding domain of the first polypeptide of the system and an antigen that binds to the extracellular binding domain of the second polypeptide of the system.
[1291] 252. A method of modulating the degradation of a polypeptide system, comprising the steps of:
   [1292] a. providing a population of cells comprising the polypeptide or system of any one of paragraphs 38-97;
   [1293] b. contacting the population of cells with an effective amount of a protease inhibitor to decrease the degradation of the polypeptide system; and
   [1294] c. contacting the population of cells with an effective amount of a degron destabilizer to increase the degradation of the polypeptide system.
[1295] 253. The method of paragraph 252, wherein the degron is a ligand-induced degradation (LID) domain and the degron destabilizer is Shield-1 or an analog thereof.
[1296] 254. The method of paragraph 252 or 253, wherein the degradation is decreased by at least 10%, at least 20%, at least 30%, at least 40%, at least 50%, at least 60%, at least 70%, at least 80%, at least 90%, at least 100%, at least 200%, at least 300%, at least 400%, or at least 500% compared to prior to contacting with the protease inhibitor.
[1297] 255. The method of any one of paragraphs 252-254, wherein the decrease in degradation results in an increase of activity of the polypeptide of at least 10%, at least 20%, at least 30%, at least 40%, at least 50%, at least 60%, at least 70%, at least 80%, at least 90%, at least 100%, at least 200%, at least 300%, at least 400%, or at least 500% compared to prior to contacting with the protease inhibitor.
[1298] 256. The method of paragraph 255, wherein the increase of activity of the polypeptide comprises an increase in intracellular signaling of the intracellular signaling domains of the polypeptide.
[1299] 257. The method of paragraph 256, wherein the increase in intracellular signaling results in an increase of activation of the population of cells.
[1300] 258. The method of paragraph 257, wherein the activation of the population of cells comprises expression of activation markers comprising CD69 and/or expression of cytokines comprising IL-2 and IFNg.
[1301] 259. The method of any one of paragraphs 257-258, wherein an increase of activation of the population of cells results in an increased killing efficiency of a target cell.
[1302] 260. The method of paragraph 252, wherein the degradation is increased by at least 10%, at least 20%, at least 30%, at least 40%, at least 50%, at least 60%, at least 70%, at least 80%, at least 90%, at least 100%, at least 200%, at least 300%, at least 400%, or at least 500% compared to prior to contacting with the degron destabilizer.
[1303] 261. The method of paragraph 260, wherein the increase in degradation results in a decrease of activity of the polypeptide of at least 10%, at least 20%, at least 30%, at least 40%, at least 50%, at least 60%, at least 70%, at least 80%, at least 90%, at least 100%, at least 200%, at least 300%, at least 400%, or at least 500% compared to prior to contacting with the degron destabilizer.
[1304] 262. The method of paragraph 261, wherein the decrease of activity of the polypeptide system comprises a decrease in intracellular signaling of the intracellular signaling domains of the polypeptide system.
[1305] 263. The method of paragraph 262, wherein the decrease in intracellular signaling results in a decrease of activation of the population of cells.
[1306] 264. The method of paragraph 263, wherein the activation of the population of cells comprises expression of activation markers comprising CD69 and/or expression of cytokines comprising IL-2 and IFNg.
[1307] 265. The method of any one of paragraphs 263-264, wherein a decrease of activation of the population of cells results in a decreased killing efficiency of a target cell.
[1308] 266. The method of any one of paragraphs 252-265, wherein the population of cells comprises immune cells.
[1309] 267. The method of paragraph 266, wherein the population of immune cells comprises CD4+ T cells, CD8+ T cells, Tregs, or NK cells.
[1310] 268. The method of any one of paragraphs 265-267, wherein the target cell expresses an antigen that binds to the extracellular binding domain of the first polypeptide of the system and an antigen that binds to the extracellular binding domain of the second polypeptide of the system.
[1311] 269. A method of treating a subject in need of a cell-based therapy comprising the steps of:
   [1312] a. administering to the subject a population of cells comprising a polypeptide or system of any one of paragraphs 38-97;
   [1313] b. administering to the subject an effective amount of a protease inhibitor; and
   [1314] c. administering to the subject an effective amount of a degron destabilizer.
[1315] 270. The method of paragraph 269, wherein the degron is a ligand-induced degradation (LID) domain and the degron destabilizer is Shield-1 or an analog thereof.
[1316] 271. The method of paragraph 269 or 270, wherein the protease inhibitor is administered at the same time the population of cells is administered.
[1317] 272. The method of any one of paragraphs 269-271, wherein the protease inhibitor is administered after the population of cells is administered.
[1318] 273. The method of any one of paragraphs 269-272, wherein the degron destabilizer is administered after the population of cells is administered.
[1319] 274. The method of any one of paragraphs 269-273, wherein an increase in concentration of the protease inhibitor results in increased activity of the polypeptide system.
[1320] 275. The method of any one of paragraphs 269-274, wherein an increase in concentration of the degron destabilizer results in decreased activity of the polypeptide system.
[1321] 276. The method of any one of paragraphs 269-275, wherein the subject has a cancer expressing an antigen that binds to the extracellular binding domain of the first polypeptide of the system and an antigen that binds to the extracellular binding domain of the second polypeptide of the system.
[1322] 277. A method of decreasing the activity of a polypeptide system, comprising the steps of:
   [1323] a. providing a population of cells comprising the polypeptide or system of any one of paragraphs 98-154; and
   [1324] b. contacting the population of cells with an effective amount of a protease inhibitor.
[1325] 278. The method of paragraph 277, wherein the activity is decreased by at least 10%, at least 20%, at least 30%, at least 40%, at least 50%, at least 60%, at least 70%, at least 80%, at least 90%, at least 100%, at least 200%, at least 300%, at least 400%, or at least 500% compared to prior to contacting with the protease inhibitor.
[1326] 279. The method of paragraph 278, wherein the decrease of activity of the polypeptide system comprises a decrease in intracellular signaling of the intracellular signaling domains of the polypeptide system.
[1327] 280. The method of paragraph 279, wherein the decrease in intracellular signaling results in a decrease of activation of the population of cells.
[1328] 281. The method of paragraph 280, wherein the activation of the population of cells comprises expression of activation markers comprising CD69 and/or expression of cytokines comprising IL-2 and IFNg.
[1329] 282. The method of any one of paragraphs 280-28 1, wherein a decrease of activation of the population of cells results in a decreased killing efficiency of a target cell.
[1330] 283. The method of any one of paragraphs 277-282, wherein the population of cells comprises immune cells.
[1331] 284. The method of paragraph 283, wherein the population of immune cells comprises CD4+ T cells, CD8+ T cells, Tregs, or NK cells.
[1332] 285. The method of any one of paragraphs 282-284, wherein the target cell expresses an antigen that binds to the extracellular binding domain of the first polypeptide of the system.
[1333] 286. A method of treating a subject in need of a cell-based therapy comprising the steps of:
   [1334] a. administering to the subject a population of cells comprising a polypeptide or system of any one of paragraphs 98-154; and
   [1335] b. administering to the subject an effective amount of a protease inhibitor.
[1336] 287. The method of paragraph 286, wherein the protease inhibitor is administered at the same time the population of cells is administered.
[1337] 288. The method of paragraph 286 or 287, wherein the protease inhibitor is administered after the population of cells is administered.
[1338] 289. The method of any one of paragraphs 286-288, wherein an increase in concentration of the protease inhibitor results in decreased activity of the polypeptide system.
[1339] 290. The method of any one of paragraphs 286-289, wherein the subject has a cancer expressing an antigen that binds to the extracellular binding domain of the polypeptide.
[1340] 291. A method of increasing the activity of a polypeptide system, comprising the steps of:
   [1341] a. providing a population of cells comprising the polypeptide or system of any one of paragraphs 155-204; and
   [1342] b. contacting the population of cells with an effective amount of a protease inhibitor.
[1343] 292. The method of paragraph 291, wherein the activity is increased by at least 10%, at least 20%, at least 30%, at least 40%, at least 50%, at least 60%, at least 70%, at least 80%, at least 90%, at least 100%, at least 200%, at least 300%, at least 400%, or at least 500% compared to prior to contacting with the protease inhibitor.
[1344] 293. The method of paragraph 292, wherein the increase of activity of the polypeptide system comprises an increase in intracellular signaling of the intracellular signaling domains of the polypeptide system.
[1345] 294. The method of paragraph 293, wherein the increase in intracellular signaling results in an increase of activation of the population of cells.
[1346] 295. The method of paragraph 294, wherein the activation of the population of cells comprises expression of activation markers comprising CD69 and/or expression of cytokines comprising IL-2 and IFNg.
[1347] 296. The method of any one of paragraphs 294-295, wherein an increase of activation of the population of cells results in an increased killing efficiency of a target cell.
[1348] 297. The method of any one of paragraphs 291-296, wherein the population of cells comprises immune cells.
[1349] 298. The method of paragraph 297, wherein the population of immune cells comprises CD4+ T cells, CD8+ T cells, Tregs, or NK cells.
[1350] 299. The method of any one of paragraphs 291-298, wherein the target cell expresses an antigen that binds to the extracellular binding domain of the first polypeptide of the system.
[1351] 300. A method of treating a subject in need of a cell-based therapy comprising the steps of:
   [1352] a. administering to the subject a population of cells comprising the polypeptide or system of any one of paragraphs 155-204; and
   [1353] b. administering to the subject an effective amount of a protease inhibitor.
[1354] 301. The method of paragraph 300, wherein the protease inhibitor is administered at the same time the population of cells is administered.
[1355] 302. The method of paragraph 300 or 301, wherein the protease inhibitor is administered after the population of cells is administered.
[1356] 303. The method of any one of paragraphs 300-302, wherein an increase in concentration of the protease inhibitor results in increased activity of the polypeptide system.
[1357] 304. The method of any one of paragraphs 300-303, wherein the subject has a cancer expressing an antigen that binds to the extracellular binding domain of the polypeptide.

[1358] Some embodiments of the technology described herein can be defined according to any of the following numbered paragraphs:
[1359] 1. A polypeptide comprising:
   [1360] a. an extracellular binding domain;
   [1361] b. a transmembrane domain;
   [1362] c. at least one intracellular signaling domain; and
   [1363] d. a repressible protease.
[1364] 2. The polypeptide of paragraph 1, wherein the repressible protease is located:
   [1365] a. between the transmembrane domain and the first intracellular signaling domain;
   [1366] b. between the first intracellular signaling domain and the second intracellular signaling domain; or
   [1367] c. between the second intracellular signaling domain and the third intracellular signaling domain.
[1368] 3. The polypeptide of paragraph 1, further comprising a cofactor for the repressible protease and at least one protease cleavage site of the repressible protease.
[1369] 4. The polypeptide of paragraph 3, wherein:
   [1370] a. the repressible protease is hepatitis C virus (HCV) nonstructural protein 3 (NS3);
   [1371] b. the cofactor is an HSV NS4A domain;
   [1372] c. the at least one protease cleavage site is located:
      [1373] i. between the transmembrane domain and the first intracellular signaling domain;
      [1374] ii. between the first intracellular signaling domain and the second intracellular signaling domain; and/or
      [1375] iii. between the second intracellular signaling domain and the third intracellular signaling domain; and/or
   [1376] d. the N-terminal amino acid of the cleaved polypeptide is associated with a high degradation rate and a low half-life.
[1377] 5. The polypeptide of paragraph 1, in combination with a protease inhibitor bound to the repressible protease, wherein the protease inhibitor is selected from grazoprevir (GZV), danoprevir, simeprevir, asunaprevir, ciluprevir, boceprevir, sovaprevir, paritaprevir, ombitasvir, paritaprevir, ritonavir, dasabuvir, and telaprevir.
[1378] 6. The polypeptide of paragraph 5, wherein the polypeptide is cleaved when a protease inhibitor is not bound to the repressible protease; and the polypeptide is not cleaved when the protease inhibitor is bound to the repressible protease.
[1379] 7. The polypeptide of paragraph 1, comprising:
   [1380] a. a polypeptide comprising from the N-terminus to the C-terminus:
      [1381] i. an extracellular binding domain;
      [1382] ii. a transmembrane domain;
      [1383] iii. at least one intracellular signaling domain;
      [1384] iv. a first protease cleavage site;
      [1385] v. a repressible protease;
      [1386] vi. a second protease cleavage site; and
      [1387] vii. at least one intracellular signaling domain;
   [1388] b. a polypeptide comprising from the N-terminus to the C-terminus:
      [1389] i. an extracellular binding domain;
      [1390] ii. a transmembrane domain;
      [1391] iii. a first intracellular signaling domain;
      [1392] iv. a second intracellular signaling domain;
      [1393] v. a first protease cleavage site;
      [1394] vi. a repressible protease;
      [1395] vii. a second protease cleavage site; and
      [1396] viii. a third intracellular signaling domain;
   [1397] c. a polypeptide comprising from the N-terminus to the C-terminus:
      [1398] i. an extracellular binding domain;
      [1399] ii. a transmembrane domain;
      [1400] iii. a first intracellular signaling domain;
      [1401] iv. a first protease cleavage site;
      [1402] v. a repressible protease;
      [1403] vi. a second protease cleavage site;
      [1404] vii. a second intracellular signaling domain; and
      [1405] viii. a third intracellular signaling domain.
   [1406] d. a polypeptide comprising from the N-terminus to the C-terminus:
      [1407] i. an extracellular binding domain;
      [1408] ii. a transmembrane domain;
      [1409] iii. a first protease cleavage site;
      [1410] iv. a repressible protease;
      [1411] v. a second protease cleavage site; and
      [1412] vi. at least one intracellular signaling domain;
   [1413] e. a polypeptide comprising from the N-terminus to the C-terminus:
      [1414] i. an extracellular binding domain;
      [1415] ii. a transmembrane domain;
      [1416] iii. a first protease cleavage site;
      [1417] iv. a repressible protease;
      [1418] v. a second protease cleavage site;
      [1419] vi. a first intracellular signaling domain;
      [1420] vii. a second intracellular signaling domain; and
      [1421] viii. a third intracellular signaling domain; and/or
   [1422] f. a polypeptide comprising one of SEQ ID NO: 34-36 or a sequence that is at least 70% identical to one of SEQ ID NO: 34-36 that maintains the same function.
[1423] 8. A system comprising:
   [1424] a. a first polypeptide comprising:
      [1425] i. an extracellular binding domain;
      [1426] ii. a transmembrane domain;
      [1427] iii. a repressible protease; and
      [1428] iv. at least one intracellular signaling domain; and
   [1429] b. a second polypeptide comprising:
      [1430] i. an extracellular binding domain;
      [1431] ii. a transmembrane domain;
      [1432] iii. at least one intracellular signaling domain; and
      [1433] iv. a degron domain.
[1434] 9. The system of paragraph 8, wherein the first polypeptide further comprises a cofactor for the repressible protease and at least one protease cleavage site of the repressible protease.
[1435] 10. The system of paragraph 9, wherein:
   [1436] a. the repressible protease is hepatitis C virus (HCV) nonstructural protein 3 (NS3);
   [1437] b. the cofactor is an HSV NS4A domain;
   [1438] c. the repressible protease and at least one protease cleavage site are located in between the transmembrane domain and the intracellular signalling domain of the first polypeptide; and/or
   [1439] d. the N-terminal amino acid of the cleaved polypeptide is associated with a high degradation rate and a low half-life.
[1440] 11. The system of paragraph 8, wherein the degron domain comprises a dihydrofolate reductase (DHFR) degron (DD) or a ligand-induced degradation (LID) domain.
[1441] 12. The system of paragraph 8, wherein the first polypeptide is in combination with:
   [1442] a. a protease inhibitor bound to the repressible protease, wherein the protease inhibitor is selected from grazoprevir (GZV), danoprevir, simeprevir, asunaprevir, ciluprevir, boceprevir, sovaprevir, paritaprevir, ombitasvir, paritaprevir, ritonavir, dasabuvir, and telaprevir;
   [1443] b. the second polypeptide is in combination with a degron stabilizer bound to the degron domain, wherein the degron is DHFR degron and the degron stabilizer is trimethoprim (TMP) or an analog thereof; and/or
   [1444] c. the second polypeptide is in combination with a degron destabilizer bound to the degron domain, wherein the degron is a ligand-induced degradation (LID) domain and the degron destabilizer is Shield-1 or an analog thereof.
[1445] 13. The system of paragraph 12, wherein:
   [1446] a. the first polypeptide is cleaved when a protease inhibitor is not bound to the repressible protease;
   [1447] b. the first polypeptide is not cleaved when the protease inhibitor is bound to the repressible protease;
   [1448] c. the second polypeptide is degraded when the degron stabilizer is not bound to the degron domain;
   [1449] d. the second polypeptide is not degraded when the degron stabilizer is bound to the degron domain;
   [1450] e. the second polypeptide is degraded when the degron destabilizer is bound to the degron domain; and/or
   [1451] f. the second polypeptide is not degraded when the degron destabilizer is not bound to the degron domain.
[1452] 14. The system of paragraph 8, wherein the first polypeptide comprises:
   [1453] a. a polypeptide comprising from the N-terminus to the C-terminus:
      [1454] i. an extracellular binding domain;
      [1455] ii. a transmembrane domain;
      [1456] iii. a first protease cleavage site;
      [1457] iv. a repressible protease;
      [1458] v. a second protease cleavage site; and
      [1459] vi. a single intracellular signaling domain; or
   [1460] b. a polypeptide comprising SEQ ID NO: 38 or a sequence that is at least 70% identical to SEQ ID NO: 38 that maintains the same function; and/or
   [1461] wherein the second polypeptide comprises from the N-terminus to the C-terminus:
   [1462] c. a polypeptide comprising from the N-terminus to the C-terminus:
      [1463] i. an extracellular binding domain;
      [1464] ii. a transmembrane domain;
      [1465] iii. at least one intracellular signaling domain; and
      [1466] iv. a degron domain; or
   [1467] d. a polypeptide comprising SEQ ID NO: 39 or a sequence that is at least 70% identical to SEQ ID NO: 39 that maintains the same function; and/or
   [1468] wherein the first polypeptide and second polypeptide are physically linked to one another and/or flank a self-cleaving peptide domain.
[1469] 15. A system comprising:
   [1470] a. a first polypeptide comprising:
      [1471] i. an extracellular binding domain;
      [1472] ii. a transmembrane domain; and
      [1473] iii. a peptide domain; and
   [1474] b. a second polypeptide comprising:
      [1475] i. an extracellular domain;
      [1476] ii. a transmembrane domain;
      [1477] iii. a repressible protease; and
      [1478] iv. at least one intracellular signaling domain.
[1479] 16. The system of paragraph 15, wherein the peptide domain is specifically bound by a repressible protease, optionally HCV NS3.
[1480] 17. The system of paragraph 15, wherein the second polypeptide further comprises a cofactor for the repressible protease; and/or wherein the first or second polypeptides do not comprise a protease cleavage site.
[1481] 18. The system of paragraph 17, wherein:
   [1482] a. the repressible protease is hepatitis C virus (HCV) nonstructural protein 3 (NS3);
   [1483] b. the repressible protease is catalytically dead;
   [1484] c. the cofactor is an HSV NS4A domain; and/or
   [1485] d. the repressible protease is located:
      [1486] i. between the transmembrane domain and the at least one intracellular signaling domain;
      [1487] ii. between the first intracellular signaling domain and the second intracellular signaling domain; or
      [1488] iii. at the C terminus of the polypeptide.
[1489] 19. The system of paragraph 15, wherein the second polypeptide is in combination with a protease inhibitor bound to the repressible protease, wherein the protease inhibitor is selected from grazoprevir (GZV), danoprevir, simeprevir, asunaprevir, ciluprevir, boceprevir, sovaprevir, paritaprevir, ombitasvir, paritaprevir, ritonavir, dasabuvir, and telaprevir.
[1490] 20. The system of paragraph 19, wherein:
   [1491] a. the repressible protease of the second polypeptide specifically binds the peptide domain of the first polypeptide in the absence of the protease inhibitor; and/or
   [1492] b. the repressible protease of the second polypeptide does not specifically bind the peptide domain of the first polypeptide in the presence of the protease inhibitor.
[1493] 21. The system of paragraph 15, wherein the first polypeptide further comprises at least one intracellular signaling domain; and each of the at least one intracellular signaling domains of the first and/or second polypeptide independently comprises an intracellular signaling domain selected from the group consisting of: TCRC; FcRy; FcRp; CD3zeta; CD3y; CD35; CD3s; CD3C; CD22; CD79a; CD79b; CD66d; CARD11; CD2; CD7; CD27; CD28; CD30; CD40; CD54 (ICAM); CD83; CD134 (OX40); CD137 (4-1BB); CD150 (SLAMF1); CD152 (CTLA4); CD223 (LAG3); CD270 (HVEM); CD273 (PD-L2); CD274 (PD-Ll); CD278 (ICOS); DAP10; LAT; KD2C SLP76; TRIM; ZAP70; and 41BB.
[1494] 22. The system of paragraph 15, wherein the first polypeptide comprises:
   [1495] a. a polypeptide comprising from the N-terminus to the C-terminus:
      [1496] i. an extracellular binding domain;
      [1497] ii. a transmembrane domain; and
      [1498] iii. a peptide domain;
   [1499] b. a polypeptide comprising from the N-terminus to the C-terminus:
      [1500] i. an extracellular binding domain;
      [1501] ii. a transmembrane domain;
      [1502] iii. at least one intracellular signaling domain; and
      [1503] iv. a peptide domain;
   [1504] c. a polypeptide comprising from the N-terminus to the C-terminus:
      [1505] i. an extracellular binding domain;
      [1506] ii. a transmembrane domain;
      [1507] iii. a single intracellular signaling domain; and
      [1508] iv. a peptide domain;
   [1509] d. a polypeptide comprising from the N-terminus to the C-terminus:
      [1510] i. an extracellular binding domain;
      [1511] ii. a transmembrane domain;
      [1512] iii. a first intracellular signaling domain;
      [1513] iv. a second intracellular signaling domain; and
      [1514] v. a peptide domain;
   [1515] e. a polypeptide comprising SEQ ID NO: 84, SEQ ID NO: 85, or a sequence that is at least 70% identical to SEQ ID NO: 84 or SEQ ID NO: 85 that maintains the same function; and/or
   [1516] wherein the second polypeptide comprises:
   [1517] f. a polypeptide comprising from the N-terminus to the C-terminus:
      [1518] i. an extracellular domain;
      [1519] ii. a transmembrane domain;
      [1520] iii. at least one intracellular signaling domain;
      [1521] iv. a repressible protease; and
      [1522] v. at least one intracellular signaling domain;
   [1523] g. a polypeptide comprising from the N-terminus to the C-terminus:
      [1524] i. an extracellular domain;
      [1525] ii. a transmembrane domain;
      [1526] iii. a first intracellular signaling domain;
      [1527] iv. a repressible protease; and
      [1528] v. a second intracellular signaling domain;
   [1529] h. a polypeptide comprising from the N-terminus to the C-terminus:
      [1530] i. an extracellular domain;
      [1531] ii. a transmembrane domain;
      [1532] iii. at least one intracellular signaling domain; and
      [1533] iv. a repressible protease;
   [1534] i. a polypeptide comprising from the N-terminus to the C-terminus:
      [1535] i. an extracellular domain;
      [1536] ii. a transmembrane domain;
      [1537] iii. a first intracellular signaling domain;
      [1538] iv. a second intracellular signaling domain; and
      [1539] v. a repressible protease;
   [1540] j. a polypeptide comprising from the N-terminus to the C-terminus:
      [1541] i. an extracellular domain;
      [1542] ii. a transmembrane domain;
      [1543] iii. a single intracellular signaling domain; and
      [1544] iv. a repressible protease;
   [1545] k. a polypeptide comprising from the N-terminus to the C-terminus:
      [1546] i. an extracellular domain;
      [1547] ii. a transmembrane domain;
      [1548] iii. a repressible protease; and
      [1549] iv. at least one intracellular signaling domain;
   [1550] l. a polypeptide comprising from the N-terminus to the C-terminus:
      [1551] i. an extracellular domain;
      [1552] ii. a transmembrane domain;
      [1553] iii. a repressible protease; and
      [1554] iv. a single intracellular signaling domain; or
   [1555] m. a polypeptide comprising one of SEQ ID NOs: 86-89 or a sequence that is at least 70% identical to one of SEQ ID NOs: 86-89 that maintains the same function; and/or
   [1556] wherein the first polypeptide and second polypeptide are physically linked to one another; flank a self-cleaving peptide domain; and/or comprise one of SEQ ID NOs: 114-121 or a sequence that is at least 70% identical to SEQ ID NO: 114-121 that maintains the same function.
[1557] 23. A system comprising:
   [1558] a. a first polypeptide comprising:
      [1559] i. an extracellular binding domain;
      [1560] ii. a transmembrane domain; and
      [1561] iii. a reader domain; and
   [1562] b. a second polypeptide comprising:
      [1563] i. a repressible protease; and
      [1564] ii. at least one intracellular signaling domain.
[1565] 24. The system of paragraph 23, wherein the reader domain specifically binds to a repressible protease in the presence of a specific protease inhibitor; and/or wherein the reader domain is a danoprevir/NS3 complex reader domain (DNCR) or a grazoprevir/NS3 reader complex (GNCR) domain.
[1566] 25. The system of paragraph 23, wherein the second polypeptide further comprises a cofactor for the repressible protease; and/or wherein the first or second polypeptides do not comprise a protease cleavage site.
[1567] 26. The system of paragraph 23, wherein:
   [1568] a. the repressible protease is hepatitis C virus (HCV) nonstructural protein 3 (NS3);
   [1569] b. the repressible protease is catalytically dead;
   [1570] c. the cofactor is an HSV NS4A domain; and/or
   [1571] d. the repressible protease is located:
      [1572] i. between the transmembrane domain and the at least one intracellular signaling domain;
      [1573] ii. between the first intracellular signaling domain and the second intracellular signaling domain; or
      [1574] iii. at the C terminus of the polypeptide.
[1575] 27. The system of paragraph 23, wherein the second polypeptide is in combination with a protease inhibitor bound to the repressible protease, wherein the protease inhibitor is selected from grazoprevir (GZV), danoprevir, simeprevir, asunaprevir, ciluprevir, boceprevir, sovaprevir, paritaprevir, ombitasvir, paritaprevir, ritonavir, dasabuvir, and telaprevir.
[1576] 28. The system of paragraph 27, wherein:
   [1577] a. the reader domain of the first polypeptide specifically binds to the repressible protease of the second polypeptide in the presence of the protease inhibitor specific to the reader domain; and/or
   [1578] b. the reader domain of the first polypeptide does not specifically bind to the repressible protease of the second polypeptide in the absence of the protease inhibitor specific to the reader domain.
[1579] 29. The system of paragraph 23, wherein the first polypeptide further comprises at least one intracellular signaling domain; and each of the at least one intracellular signaling domains of the first and second polypeptide independently comprises an intracellular signaling domain selected from the group consisting of: TCRC; FcRy; FcRp; CD3zeta; CD3y; CD35; CD3s; CD3C; CD22; CD79a; CD79b; CD66d; CARD11; CD2; CD7; CD27; CD28; CD30; CD40; CD54 (ICAM); CD83; CD134 (OX40); CD137 (4-1BB); CD150 (SLAMF1); CD152 (CTLA4); CD223 (LAG3); CD270 (HVEM); CD273 (PD-L2); CD274 (PD-Ll); CD278 (ICOS); DAP10; LAT; KD2C SLP76; TRIM; ZAP70; and 41BB.
[1580] 30. The system of paragraph 23, wherein the first polypeptide comprises:
   [1581] a. a polypeptide comprising from the N-terminus to the C-terminus:
      [1582] i. an extracellular binding domain;
      [1583] ii. a transmembrane domain;
      [1584] iii. a first intracellular signaling domain;
      [1585] iv. a second intracellular signaling domain; and
      [1586] v. a reader domain;
   [1587] b. a polypeptide comprising from the N-terminus to the C-terminus:
      [1588] i. an extracellular binding domain;
      [1589] ii. a transmembrane domain;
      [1590] iii. a single intracellular signaling domain; and
      [1591] iv. and a reader domain; or
   [1592] c. a polypeptide comprising residues 1-626 of SEQ ID NO: 90, residues 1-668 of SEQ ID NO: 91, residues 1-630 of SEQ ID NO: 92, residues 1-672 of SEQ ID NO: 93, residues 1-626 of SEQ ID NO: 127, residues 1-630 of SEQ ID NO: 128, or a sequence that is at least 70% identical to residues 1-626 of SEQ ID NO: 90, residues 1-668 of SEQ ID NO: 91, residues 1-630 of SEQ ID NO: 92, residues 1-672 of SEQ ID NO: 93, residues 1-626 of SEQ ID NO: 127, or residues 1-630 of SEQ ID NO: 128, that maintains the same function; and/or
   [1593] wherein the second polypeptide comprises:
   [1594] d. a polypeptide comprising from the N-terminus to the C-terminus:
      [1595] i. an extracellular domain;
      [1596] ii. a transmembrane domain;
      [1597] iii. at least one intracellular signaling domain;
      [1598] iv. a repressible protease; and
      [1599] v. at least one intracellular signaling domain;
   [1600] e. a polypeptide comprising from the N-terminus to the C-terminus:
      [1601] i. an extracellular domain;
      [1602] ii. a transmembrane domain;
      [1603] iii. a first intracellular signaling domain;
      [1604] iv. a repressible protease; and
      [1605] v. a second intracellular signaling domain; or
   [1606] f. a polypeptide comprising one of SEQ ID NO: 86-89 or residues 648-1313 of SEQ ID NO: 90, residues 690-1355 of SEQ ID NO: 91, residues 652-1317 of SEQ ID NO: 92, residues 694-1359 of SEQ ID NO: 93, residues 648-1303 of SEQ ID NO: 127, or residues 652-1307 of SEQ ID NO: 128, or a sequence that is at least 70% identical to one of SEQ ID NO: 86-89 or residues 648-1313 of SEQ ID NO: 90, residues 690-1355 of SEQ ID NO: 91, residues 652-1317 of SEQ ID NO: 92, residues 694-1359 of SEQ ID NO: 93, residues 648-1303 of SEQ ID NO: 127, or residues 652-1307 of SEQ ID NO: 128 that maintains the same function; and/or
   [1607] wherein the first polypeptide and second polypeptide are physically linked to one another; flank a self-cleaving peptide domain; and/or comprise one of SEQ ID NOs: 90-93 or 127-128 or a sequence that is at least 70% identical to SEQ ID NOs: 90-93 or 127-128 that maintains the same function.

### EXAMPLES

### Example 1

[1608] Control of Chimeric Antigen Receptor with Small Molecules

[1609] The transfer of chimeric antigen receptor (CAR)-expressing T cells to patients is a promising approach for cancer immunotherapy. This therapeutic approach is based on the genetic reprogramming of T cells with a synthetic immune receptor that directs them to destroy malignant cells. CARs typically consist of a single-chain antibody serving as the extracellular antigen-recognition domain, and signaling cytoplasmic domains to trigger the T cell activation (see e.g., FIG. 1A). CAR-expressing T cells targeted to CD 19 have shown success in curing leukemia in clinical trials, where up to 88% of patients achieved complete remission following treatment. While encouraging, T cell overactivity leading to cytokine release syndrome (CRS) is still a major issue to contend with in clinical practice. In severe cases of CRS, the uncontrolled immune response can lead to patient deaths.

[1610] The drug-inducible CAR design described herein addresses a major safety limitation in adoptive immunotherapy by providing a small molecule-controllable CAR system that can be used to regulate CAR activity. While several inducible switches are currently available, only a few of them are regulated by small molecules. Small molecules are cheaper and easier to administer, and are thus more advantageous than protein-based inducers. However, one of the available small molecule controllable CARs uses an analog of Rapamycin as the inducer, which has shown poor pharmacokinetics, thus limiting its utility in the clinic. The other system from BELLICUM PHARMACEUTICALS only partially controls signaling activity, and consequently has limited capability for regulating T cell activity. Furthermore, both of the small molecules involved in these technologies are not FDA-approved. Therefore, a small-molecule gated CAR with an FDA-approved drug inducer with a favorable toxicity profile and pharmacokinetics is highly desirable.

[1611] Due to promising clinical results, hundreds of CAR T cell therapies have been developed for treating a wide variety of disease indications. A major bottleneck to the development of CAR T cell therapy, however, is its potential devastating adverse side effect, which derailed JUNO THERAPEUTICS' lead CAR T candidate, JCR15. Therefore, to guard against such catastrophic failure, it is critical for companies to acquire safety control switch technology. Aware of this need, KITE PHARMA/GILEAD has recently purchased CELL DESIGN LAB—a company that develops a small-molecule gated CAR technology using an inducer that has serious stability issues. The switch described herein fills an important need in CAR T technology.

[1612] To control chimeric antigen receptor (CAR) activity, the non-structural protein (NS3) domain was incorporated into the structure of an CAR. The NS3 protease domain originates from the hepatitis C virus (HCV), and has been used in previous work in systems to control protein tagging and protein expression. In the absence of any drug, NS3 cleaves to excise itself at both the N and C termini. When a cell-permeable FDA-approved inhibitor (grazoprevir) is present, NS3 protease activity is blocked. Within a CAR molecule, the NS3 is placed between the membrane and the signaling domains or between the CD28 and CD3ζ (CD3zeta). When grazoprevir is absent, NS3 excises itself, cleaving the downstream domains in doing so. This truncated CAR molecule prevents the CAR from transducing any activation signal. In contrast, when grazoprevir is added, NS3 cleavage is blocked and the CAR remains intact for T cell signaling (see e.g., FIG. 1A).

### Functionality in CD4+ and CD8+ T Cells

[1613] In designing the NS3 CAR, various configurations were created to determine how design affects CAR function. In each case, the inducible domain was directly fused to the receptor. As the NS3 protease functions by cleaving at both ends of the domain, the NS3 protease entity needed to be located within the CAR structure. To determine which configuration worked best for the NS3 CAR, the NS3 domain was placed after the CD8 hinge (V1), CD28 costimulatory domain (V2), or 4-1BB costimulatory domain (V3) of a third-generation CAR (see e.g., FIG. 1A). In each of these three versions, the CD3 domain is cleaved from the rest of the CAR unless the NS3 protease is inhibited by a drug. This allows for CD3 signaling to depend upon the presence of the inhibitor.

[1614] These CARs were introduced into human CD4+ and CD8+ primary T cells and tested for functionality by mixing with Her2+ target NALM cells. As a readout for NS3 CAR control over T cell activity, levels of CD69 (an early T cell activation marker) and cytokine release (indicative of downstream effector function) were measured. It is expected that in the absence of grazoprevir (an NS3 inhibitor), the CAR is dismantled, rendering it non-functional. Once grazoprevir is added, the full CAR is assembled, thus allowing the T cell to activate when Her2-expressing target cells are present (see e.g., FIG. 1B). CD69 levels indicated that all three versions of the CAR required both grazoprevir (NS3 inhibitor) and target cells to be active (see e.g., FIG. 2A). Furthermore, cytokine measurements of IL-2 and IFN-gamma, showed that CARs expressing V2 and V3 had their greatest cytokine release in the presence of grazoprevir and target cells. While V1 T cells also had their highest cytokine levels under this condition, their maximal levels were considerably lower than in cells expressing V2 or V3 (see e.g., FIG. 2B). In each case, the NS3 CARs were compared to traditional third-generation Her2 CAR, which showed no response to the NS3 inhibitor (see e.g., FIG. 2A-2B).

### Cell Killing

[1615] To further evaluate the downstream effector function of NS3 CAR T cells, their cell killing abilities were tested. Her2-specific NS3 CAR CD8+ T cells were mixed with Her2-expressing NALM cells at a 1:1 ratio and the extent of cell killing determined. Results showed that all three versions of the NS3 CAR allowed for T cells to kill target NALM cells under the control of grazoprevir. Furthermore, the extent of cell killing was comparable to CD8+ T cells expressing the traditional Her2 CAR (see e.g., FIG. 3A).

[1616] By varying the dose of NS3 inhibitor, the level of CD8+ T cell-mediated killing could be modulated. To demonstrate this, CD8+ T cells expressing the V2 NS3 CAR were chosen as they indicated the highest levels of cytokine release. These cells were mixed with target NALM cells at a 1:1 ratio and the amount of NS3 inhibitor varied between 0 uM-5 uM. A positive correlation was observed between the level of inhibitor and cell killing ability of the T cells (see e.g., FIG. 3B).

### Other Cell Types

[1617] Other than helper (CD4+) and cytotoxic (CD8+) T cells, the inducible NS3 CARs can be applied to other immune cell types. For example, CARs can suppress immune responses when introduced into regulatory T (Treg) cells. Treg cells are responsible for maintaining immune homeostasis and tolerance, and preventing autoimmunity. Due to their unique role in the immune system, Treg cells have been under investigation as therapeutic agents for treating autoimmune diseases, such as type 1 diabetes, or preventing organ transplant rejection.

[1618] The NS3 CAR was introduced into Treg cells to evaluate whether it can regulate suppressive behavior under the control of grazoprevir. First, Treg cell lines were generated expressing the V1 NS3 and V2 NS3 Her2-specific CARs (see e.g., FIG. 4A). Activating either V1 or V2 NS3 CARs on Treg cells by mixing these cells with Her2-expressing NALM cells resulted in the expression of CD69 (see e.g., FIG. 4B). Furthermore, to confirm the regulation of the suppressive ability of these NS3 CAR Treg cells by grazoprevir, V1 and V2 NS3 CAR Tregs were incubated with anti-CD 19 CAR-expressing CD4+ T cells and Her2+ NALM cells. CD4+ proliferation was evaluated by staining these cells with a fluorescent cell tracer and tracking proliferation following 6 days of incubation. The data showed that V1 and V2 NS3 CAR-Tregs were able to suppress CD4+ proliferation in a drug-dependent manner and their suppression efficiency was as high as that observed in Tregs that express a traditional CAR (see e.g., FIG. 4C).

[1619] Natural killer (NK) cells also represent a promising alternative to T cells for cancer immunotherapy. They display potent anti-tumor activity and exhibit little, if any, NK cell-related toxicity. Additionally, unlike engineered T cells that can lead to graft-vs-host disease, NK cells, which lack the TCR, are a potential candidate for generating “off-the-shelf” cellular therapy. To test whether the NS3 CAR can control NK cell activity, a simplified first-generation anti-Her2 NS3 CAR (see e.g., pHS241-ANDgate-NS3, SEQ ID NOs: 5, 38, 237) was expressed on NK-92MI cells and incubated with Her2-expressing NALM cells. Results showed that the addition of grazoprevir allowed for increased killing of the target cells, though high basal killing was observed in its absence (see e.g., FIG. 5A). This is likely due to high CAR expression levels, as flow cytometry data suggests that higher CAR levels correspond to higher basal killing (see e.g., FIG. 5B). IFN-gamma levels also indicated control over NK cell activity by grazoprevir (see e.g., FIG. 5C).

[1620] Previous literature has shown that the proximal placement of the CD28 domain to the transmembrane region of the CAR is sufficient for signaling through the CAR and activation of NK cells. Interestingly, the same observation was made in NK-92MI cells expressing V1 and V2 NS3 CARs (see e.g., FIG. 5A). When incubated with target cells, V2 CAR-expressing NK cells (where the CD28 domain was directly following the transmembrane region) indicated high basal killing in the absence of grazoprevir. When these two regions were split up with the NS3 domain, as in the V1 CAR, the basal killing was lowered. The same result was observed with cytokine release by measurement of IFN-gamma (see e.g., FIG. 5C). This suggests that the NS3 CAR can be applied to NK cells, though the design principles for CARs vary between immune cell types and must be taken into account.

### Dual Molecule Tunable Logic AND Gates

[1621] Also described herein is a dual molecule tunable logic AND gates for enhancing targeting specificity of CAR-T cells, specifically a DD CAR, which contains a DHFR degron (DD) regulated by a second drug, to be used in conjunction with the NS3 CAR. Dihydrofolate reductase (DHFR) reduces dihydrofolate to tetrahydrofolate and is essential for E. coli replication and survival. TMP is an antibiotic that can bind to E. coli DHFR with a much higher affinity than its mammalian counterpart. Fusion of the engineered DHFR domain with a protein of interest destabilizes the protein, and when TMP binds to the DHFR domain it stabilizes the fusion protein, thus serving as an inducible protein expression system. Described herein is the generation of a combinatorial logic AND gate by distributing CAR intracellular signaling domains between two distinct scFvs with each signaling domain associated with either NS3 or DD. As shown in FIG. 6A, the AND gate CAR system comprised of a first receptor with the NS3 domain positioned between scFv1 and CD3z, and a second receptor with the DD positioned after scFv2-CD28, generating a functional dual-molecule controllable CAR-T cell.

[1622] The NS3-DD CAR was generated by fusing a Her2-specific scFV with the NS3 domain, and an Axl-specific scFv with the DD. The drug tunability of this system was tested in CD4+ and CD8+ T cells. Unlike the NS3 cleavage mechanism, the DD destabilizes the whole protein of interest and leads it to proteasomal degradation. As such, the scFv-CD28 chain is stabilized on the cell surface only in the presence of TMP (see e.g., FIG. 6A). To test NS3-DD inducibility, Her2+/Axl+ NALM cells were co-cultured with CD4+ or CD8+ T cells at a 1:1 ratio and the amount of NS3 inhibitor and DD stabilizer was varied between 0 uM and 5 uM. CD69, IL-2 and IFN-gamma responses from CD4+ T cells were raised by the CD3z signaling domain alone which is induced by NS3 inhibitor. However, the CD28 signaling domain alone stabilized by TMP was not able to trigger any response. When both NS3 inhibitor and TMP were present, the stabilized CD28 signaling domain led to an even higher CD69 level, and IL-2 and IFN-gamma secretion. The killing ability of NS3-DD CAR CD8+ T cells was also induced by the presence of both drugs, and was shown to be tunable by varying drug concentration (see e.g., FIGS. 6B and 6C). Such combinatorial control over CAR activity provides both safety controls and signal balancing for improved tumor specificity.

### Immunogenicity

[1623] The NS3 and DD domains are of non-human origin, and thus they can be digested and presented on the Human Leukocyte Antigen (HLA) of the engineered T cells to elicit an immune response. This could result in the clearance of therapeutic cells by the patient's endogenous cytotoxic T cells, thus diminishing their persistence in the body. One approach to reducing immunogenicity is to knock out HLA Class I that recruits CD8+ T cells. The β2M (and thus HLA-I) gene can be knocked out in NS3 CAR-expressing CD4+ T cells, suggesting the ability of these engineered cells to evade an immunogenic response (see e.g., FIG. 7).

### Example 2

[1624] NS3 OFF CARs and Reader CARs

[1625] NS3 CAR OFF switches, comprising first and second components, were constructed as described herein. The first component comprises a peptide, which is specific for the NS3 of the second component, thus bringing the two components together. The NS3 used in the first component of the OFF switch is a catalytically-dead version of NS3, so it does not cleave the peptide. Accordingly, the first and second components do not comprise any protease cleavage sites. When added, the protease inhibitor competes with the peptide for binding to the inactive NS3, thus displacing the peptide, and the two components are no longer brought together (see e.g., FIG. 8A-8B).

[1626] Two different versions of the first component (c and d) and four different versions of the second component of the OFF-switch (i, ii, iii, and iv) were tested in Jurkat T cells. Compared to WT cells, all permutations of the two-component OFF-switch resulted in detectable NFAT-GFP levels, which was diminished to baseline in the presence of grazoprevir (see e.g., FIG. 8C). Increased CD69 levels compared to wild type were also observed using various combinations of the first and second components in Jurkat cells, which was once again diminished to baseline in the presence of grazoprevir (see e.g., FIG. 8D). The OFF-switch CARs can also function when expressed in a single vector (see e.g., FIG. 9A-9C, FIG. 10A-10D).

[1627] NS3 reader CAR polypeptides were also constructed and tested. Such CAR polypeptides comprise first component comprising a danoprevir/NS3 complex reader (DNCR) or a grazoprevir/NS3 reader complex (GNCR) and a second component comprising NS3 polypeptide and a CD3zeta signaling domain (see e.g., FIG. 12A). The second component is recruited to the reader domain of the first component only in the presence of its cognate protease inhibitor (e.g., danoprevir, grazoprevir, etc.) NS3 reader-C28-CAR polypeptides and a membrane-bound NS3 polypeptide were tested in Jurkat T cells. GFP levels (indicative of CAR activation) were highest when a DNCR reader was in the presence of danoprevir (DNV) or when a GNCR reader was in the presence of grazoprevir (GZV). Similarly, when testing NS3 readers comprising both CD28 and 4-1BB domains, GFP levels were once again highest with DNCR/DNV and GNCR/GZV (see e.g., FIG. 12B, FIG. 12C). The two components of the reader CAR can be expressed from the same vector (see e.g., FIG. 11A-11C).

What is claimed herein is:

1. A polypeptide comprising:
a. an extracellular binding domain;
b. a transmembrane domain;
c. at least one intracellular signaling domain; and
d. a repressible protease.

2. The polypeptide of claim 1, wherein the repressible protease is located:
a. between the transmembrane domain and the first intracellular signaling domain;
b. between the first intracellular signaling domain and the second intracellular signaling domain; or
c. between the second intracellular signaling domain and the third intracellular signaling domain.

3. The polypeptide of claim 1, further comprising a cofactor for the repressible protease and at least one protease cleavage site of the repressible protease.

4. The polypeptide of claim 3, wherein:
a. the repressible protease is hepatitis C virus (HCV) nonstructural protein 3 (NS3);
b. the cofactor is an HSV NS4A domain;
c. the at least one protease cleavage site is located:
i. between the transmembrane domain and the first intracellular signaling domain;
ii. between the first intracellular signaling domain and the second intracellular signaling domain; and/or
iii. between the second intracellular signaling domain and the third intracellular signaling domain; and/or
d. the N-terminal amino acid of the cleaved polypeptide is associated with a high degradation rate and a low half-life.

5. The polypeptide of claim 1, in combination with a protease inhibitor bound to the repressible protease, wherein the protease inhibitor is selected from grazoprevir (GZV), danoprevir, simeprevir, asunaprevir, ciluprevir, boceprevir, sovaprevir, paritaprevir, ombitasvir, paritaprevir, ritonavir, dasabuvir, and telaprevir.

6. The polypeptide of claim 5, wherein the polypeptide is cleaved when a protease inhibitor is not bound to the repressible protease; and the polypeptide is not cleaved when the protease inhibitor is bound to the repressible protease.

7. The polypeptide of claim 1, comprising:
a. a polypeptide comprising from the N-terminus to the C-terminus:
i. an extracellular binding domain;
ii. a transmembrane domain;
iii. at least one intracellular signaling domain;
iv. a first protease cleavage site;
v. a repressible protease;
vi. a second protease cleavage site; and
vii. at least one intracellular signaling domain;
b. a polypeptide comprising from the N-terminus to the C-terminus:
i. an extracellular binding domain;
ii. a transmembrane domain;
iii. a first intracellular signaling domain;
iv. a second intracellular signaling domain;
v. a first protease cleavage site;
vi. a repressible protease;
vii. a second protease cleavage site; and
viii. a third intracellular signaling domain;
c. a polypeptide comprising from the N-terminus to the C-terminus:
i. an extracellular binding domain;
ii. a transmembrane domain;
iii. a first intracellular signaling domain;
iv. a first protease cleavage site;
v. a repressible protease;
vi. a second protease cleavage site;
vii. a second intracellular signaling domain; and
viii. a third intracellular signaling domain.
d. a polypeptide comprising from the N-terminus to the C-terminus:
i. an extracellular binding domain;
ii. a transmembrane domain;
iii. a first protease cleavage site;
iv. a repressible protease;
v. a second protease cleavage site; and
vi. at least one intracellular signaling domain;
e. a polypeptide comprising from the N-terminus to the C-terminus:
i. an extracellular binding domain;
ii. a transmembrane domain;
iii. a first protease cleavage site;
iv. a repressible protease;
v. a second protease cleavage site;
vi. a first intracellular signaling domain;
vii. a second intracellular signaling domain; and
viii. a third intracellular signaling domain; and/or
f. a polypeptide comprising one of SEQ ID NO: 34-36 or a sequence that is at least 70% identical to one of SEQ ID NO: 34-36 that maintains the same function.

8. A system comprising:
a. a first polypeptide comprising:
i. an extracellular binding domain;
ii. a transmembrane domain;
iii. a repressible protease; and
iv. at least one intracellular signaling domain; and
b. a second polypeptide comprising:
i. an extracellular binding domain;
ii. a transmembrane domain;
iii. at least one intracellular signaling domain; and
iv. a degron domain.

9. The system of claim 8, wherein the first polypeptide further comprises a cofactor for the repressible protease and at least one protease cleavage site of the repressible protease.

10. The system of claim 9, wherein:
a. the repressible protease is hepatitis C virus (HCV) nonstructural protein 3 (NS3);
b. the cofactor is an HSV NS4A domain;
c. the repressible protease and at least one protease cleavage site are located in between the transmembrane domain and the intracellular signalling domain of the first polypeptide; and/or
d. the N-terminal amino acid of the cleaved polypeptide is associated with a high degradation rate and a low half-life.

11. The system of claim 8, wherein the degron domain comprises a dihydrofolate reductase (DHFR) degron (DD) or a ligand-induced degradation (LID) domain.

12. The system of claim 8, wherein the first polypeptide is in combination with:
a. a protease inhibitor bound to the repressible protease, wherein the protease inhibitor is selected from grazoprevir (GZV), danoprevir, simeprevir, asunaprevir, ciluprevir, boceprevir, sovaprevir, paritaprevir, ombitasvir, paritaprevir, ritonavir, dasabuvir, and telaprevir;
b. the second polypeptide is in combination with a degron stabilizer bound to the degron domain, wherein the degron is DHFR degron and the degron stabilizer is trimethoprim (TMP) or an analog thereof; and/or
c. the second polypeptide is in combination with a degron destabilizer bound to the degron domain, wherein the degron is a ligand-induced degradation (LID) domain and the degron destabilizer is Shield-1 or an analog thereof.

13. The system of claim 12, wherein:
a. the first polypeptide is cleaved when a protease inhibitor is not bound to the repressible protease;
b. the first polypeptide is not cleaved when the protease inhibitor is bound to the repressible protease;
c. the second polypeptide is degraded when the degron stabilizer is not bound to the degron domain;
d. the second polypeptide is not degraded when the degron stabilizer is bound to the degron domain;
e. the second polypeptide is degraded when the degron destabilizer is bound to the degron domain; and/or
f. the second polypeptide is not degraded when the degron destabilizer is not bound to the degron domain.

14. The system of claim 8, wherein the first polypeptide comprises:
a. a polypeptide comprising from the N-terminus to the C-terminus:
i. an extracellular binding domain;
ii. a transmembrane domain;
iii. a first protease cleavage site;
iv. a repressible protease;
v. a second protease cleavage site; and
vi. a single intracellular signaling domain; or
b. a polypeptide comprising SEQ ID NO: 38 or a sequence that is at least 70% identical to SEQ ID NO: 38 that maintains the same function; and/or
wherein the second polypeptide comprises from the N-terminus to the C-terminus:
c. a polypeptide comprising from the N-terminus to the C-terminus:
i. an extracellular binding domain;
ii. a transmembrane domain;
iii. at least one intracellular signaling domain; and
iv. a degron domain; or
d. a polypeptide comprising SEQ ID NO: 39 or a sequence that is at least 70% identical to SEQ ID NO: 39 that maintains the same function; and/or
wherein the first polypeptide and second polypeptide are physically linked to one another and/or flank a self-cleaving peptide domain.

15. A system comprising:
a. a first polypeptide comprising:
i. an extracellular binding domain;
ii. a transmembrane domain; and
iii. a peptide domain; and
b. a second polypeptide comprising:
i. an extracellular domain;
ii. a transmembrane domain;
iii. a repressible protease; and
iv. at least one intracellular signaling domain.

16. The system of claim 15, wherein the peptide domain is specifically bound by a repressible protease, optionally HCV NS3.

17. The system of claim 15, wherein the second polypeptide further comprises a cofactor for the repressible protease; and/or wherein the first or second polypeptides do not comprise a protease cleavage site.

18. The system of claim 17, wherein:
a. the repressible protease is hepatitis C virus (HCV) nonstructural protein 3 (NS3);
b. the repressible protease is catalytically dead;
c. the cofactor is an HSV NS4A domain; and/or
d. the repressible protease is located:
i. between the transmembrane domain and the at least one intracellular signaling domain;
ii. between the first intracellular signaling domain and the second intracellular signaling domain; or
iii. at the C terminus of the polypeptide.

19. The system of claim 15, wherein the second polypeptide is in combination with a protease inhibitor bound to the repressible protease, wherein the protease inhibitor is selected from grazoprevir (GZV), danoprevir, simeprevir, asunaprevir, ciluprevir, boceprevir, sovaprevir, paritaprevir, ombitasvir, paritaprevir, ritonavir, dasabuvir, and telaprevir.

20. The system of claim 19, wherein:
a. the repressible protease of the second polypeptide specifically binds the peptide domain of the first polypeptide in the absence of the protease inhibitor; and/or
b. the repressible protease of the second polypeptide does not specifically bind the peptide domain of the first polypeptide in the presence of the protease inhibitor.

21. The system of claim 15, wherein the first polypeptide further comprises at least one intracellular signaling domain; and each of the at least one intracellular signaling domains of the first and/or second polypeptide independently comprises an intracellular signaling domain selected from the group consisting of: TCRC; FcRy; FcRp; CD3zeta; CD3y; CD35; CD3s; CD3C; CD22; CD79a; CD79b; CD66d; CARD 11; CD2; CD7; CD27; CD28; CD30; CD40; CD54 (ICAM); CD83; CD134 (OX40); CD137 (4-1BB); CD150 (SLAMF1); CD152 (CTLA4); CD223 (LAG3); CD270 (HVEM); CD273 (PD-L2); CD274 (PD-Ll); CD278 (ICOS); DAP10; LAT; KD2C SLP76; TRIM; ZAP70; and 41BB.

22. The system of claim 15, wherein the first polypeptide comprises:
a. a polypeptide comprising from the N-terminus to the C-terminus:
i. an extracellular binding domain;
ii. a transmembrane domain; and
iii. a peptide domain;
b. a polypeptide comprising from the N-terminus to the C-terminus:
i. an extracellular binding domain;
ii. a transmembrane domain;
iii. at least one intracellular signaling domain; and
iv. a peptide domain;
c. a polypeptide comprising from the N-terminus to the C-terminus:
i. an extracellular binding domain;
ii. a transmembrane domain;
iii. a single intracellular signaling domain; and
iv. a peptide domain;
d. a polypeptide comprising from the N-terminus to the C-terminus:
i. an extracellular binding domain;
ii. a transmembrane domain;
iii. a first intracellular signaling domain;
iv. a second intracellular signaling domain; and
v. a peptide domain;
e. a polypeptide comprising SEQ ID NO: 84, SEQ ID NO: 85, or a sequence that is at least 70% identical to SEQ ID NO: 84 or SEQ ID NO: 85 that maintains the same function; and/or
wherein the second polypeptide comprises:
f. a polypeptide comprising from the N-terminus to the C-terminus:
i. an extracellular domain;
ii. a transmembrane domain;
iii. at least one intracellular signaling domain;
iv. a repressible protease; and
v. at least one intracellular signaling domain;
g. a polypeptide comprising from the N-terminus to the C-terminus:
i. an extracellular domain;
ii. a transmembrane domain;
iii. a first intracellular signaling domain;
iv. a repressible protease; and
v. a second intracellular signaling domain;
h. a polypeptide comprising from the N-terminus to the C-terminus:
i. an extracellular domain;
ii. a transmembrane domain;
iii. at least one intracellular signaling domain; and
iv. a repressible protease;
i. a polypeptide comprising from the N-terminus to the C-terminus:
i. an extracellular domain;
ii. a transmembrane domain;
iii. a first intracellular signaling domain;
iv. a second intracellular signaling domain; and
v. a repressible protease;
j. a polypeptide comprising from the N-terminus to the C-terminus:
i. an extracellular domain;
ii. a transmembrane domain;
iii. a single intracellular signaling domain; and
iv. a repressible protease;
k. a polypeptide comprising from the N-terminus to the C-terminus:
i. an extracellular domain;
ii. a transmembrane domain;
iii. a repressible protease; and
iv. at least one intracellular signaling domain;
l. a polypeptide comprising from the N-terminus to the C-terminus:
i. an extracellular domain;
ii. a transmembrane domain;
iii. a repressible protease; and
iv. a single intracellular signaling domain; or
m. a polypeptide comprising one of SEQ ID NOs: 86-89 or a sequence that is at least 70% identical to one of SEQ ID NOs: 86-89 that maintains the same function; and/or
wherein the first polypeptide and second polypeptide are physically linked to one another; flank a self-cleaving peptide domain; and/or comprise one of SEQ ID NOs: 114-121 or a sequence that is at least 70% identical to SEQ ID NO: 114-121 that maintains the same function.

23. A system comprising:
a. a first polypeptide comprising:
i. an extracellular binding domain;
ii. a transmembrane domain; and
iii. a reader domain; and
b. a second polypeptide comprising:
i. a repressible protease; and
ii. at least one intracellular signaling domain.

24. The system of claim 23, wherein the reader domain specifically binds to a repressible protease in the presence of a specific protease inhibitor; and/or wherein the reader domain is a danoprevir/NS3 complex reader domain (DNCR) or a grazoprevir/NS3 reader complex (GNCR) domain.

25. The system of claim 23, wherein the second polypeptide further comprises a cofactor for the repressible protease; and/or wherein the first or second polypeptides do not comprise a protease cleavage site.

26. The system of claim 23, wherein:
a. the repressible protease is hepatitis C virus (HCV) nonstructural protein 3 (NS3);
b. the repressible protease is catalytically dead;
c. the cofactor is an HSV NS4A domain; and/or
d. the repressible protease is located:
i. between the transmembrane domain and the at least one intracellular signaling domain;
ii. between the first intracellular signaling domain and the second intracellular signaling domain; or
iii. at the C terminus of the polypeptide.

27. The system of claim 23, wherein the second polypeptide is in combination with a protease inhibitor bound to the repressible protease, wherein the protease inhibitor is selected from grazoprevir (GZV), danoprevir, simeprevir, asunaprevir, ciluprevir, boceprevir, sovaprevir, paritaprevir, ombitasvir, paritaprevir, ritonavir, dasabuvir, and telaprevir.

28. The system of claim 27, wherein:
a. the reader domain of the first polypeptide specifically binds to the repressible protease of the second polypeptide in the presence of the protease inhibitor specific to the reader domain; and/or
b. the reader domain of the first polypeptide does not specifically bind to the repressible protease of the second polypeptide in the absence of the protease inhibitor specific to the reader domain.

29. The system of claim 23, wherein the first polypeptide further comprises at least one intracellular signaling domain; and each of the at least one intracellular signaling domains of the first and second polypeptide independently comprises an intracellular signaling domain selected from the group consisting of: TCRC; FcRy; FcRp; CD3zeta; CD3y; CD35; CD3s; CD3C; CD22; CD79a; CD79b; CD66d; CARD 11; CD2; CD7; CD27; CD28; CD30; CD40; CD54 (ICAM); CD83; CD134 (OX40); CD137 (4-1BB); CD150 (SLAMF1); CD152 (CTLA4); CD223 (LAG3); CD270 (HVEM); CD273 (PD-L2); CD274 (PD-Ll); CD278 (ICOS); DAP10; LAT; KD2C SLP76; TRIM; ZAP70; and 41BB.

30. The system of claim 23, wherein the first polypeptide comprises:
a. a polypeptide comprising from the N-terminus to the C-terminus:
i. an extracellular binding domain;
ii. a transmembrane domain;
iii. a first intracellular signaling domain;
iv. a second intracellular signaling domain; and
v. a reader domain;
b. a polypeptide comprising from the N-terminus to the C-terminus:
i. an extracellular binding domain;
ii. a transmembrane domain;
iii. a single intracellular signaling domain; and
iv. and a reader domain; or
c. a polypeptide comprising residues 1-626 of SEQ ID NO: 90, residues 1-668 of SEQ ID NO: 91, residues 1-630 of SEQ ID NO: 92, residues 1-672 of SEQ ID NO: 93, residues 1-626 of SEQ ID NO: 127, residues 1-630 of SEQ ID NO: 128, or a sequence that is at least 70% identical to residues 1-626 of SEQ ID NO: 90, residues 1-668 of SEQ ID NO:
91, residues 1-630 of SEQ ID NO: 92, residues 1-672 of SEQ ID NO: 93, residues 1-626 of SEQ ID NO: 127, or residues 1-630 of SEQ ID NO: 128, that maintains the same function; and/or
wherein the second polypeptide comprises:
d. a polypeptide comprising from the N-terminus to the C-terminus:
i. an extracellular domain;
ii. a transmembrane domain;
iii. at least one intracellular signaling domain;
iv. a repressible protease; and
v. at least one intracellular signaling domain;
e. a polypeptide comprising from the N-terminus to the C-terminus:
i. an extracellular domain;
ii. a transmembrane domain;
iii. a first intracellular signaling domain;
iv. a repressible protease; and
v. a second intracellular signaling domain; or
f. a polypeptide comprising one of SEQ ID NO: 86-89 or residues 648-1313 of SEQ ID NO: 90, residues 690-1355 of SEQ ID NO: 91, residues 652-1317 of SEQ ID NO: 92, residues 694-1359 of SEQ ID NO: 93, residues 648-1303 of SEQ ID NO: 127, or residues 652-1307 of SEQ ID NO: 128, or a sequence that is at least 70% identical to one of SEQ ID NO: 86-89 or residues 648-1313 of SEQ ID NO: 90, residues 690-1355 of SEQ ID NO: 91, residues 652-1317 of SEQ ID NO: 92, residues 694-1359 of SEQ ID NO: 93, residues 648-1303 of SEQ ID NO: 127, or residues 652-1307 of SEQ ID NO: 128 that maintains the same function; and/or
wherein the first polypeptide and second polypeptide are physically linked to one another; flank a self-cleaving peptide domain; and/or comprise one of SEQ ID NOs: 90-93 or 127-128 or a sequence that is at least 70% identical to SEQ ID NOs: 90-93 or 127-128 that maintains the same function.

The application's sequence listing, which the Patent Office published only in electronic form, follows.

SEQUENCE LISTING (269 sequences)

SEQ ID NO: 1 - DNA, 2571 bp, Artificial Sequence
  synthetic polynucleotide
atggccttaccagtgaccgccttgctcctgccgctggccttgctgctccacgccgccaggccgaaatacctattgcctacggcagccgctggattgttattactcgcggcccagccggccatggcccaggtgcagctggtgcagtctggggcagaggtgaaaaagcccggggagtctctgaagatctcctgtaagggttctggatacagctttaccagctactggatcgcctgggtgcgccagatgcccgggaaaggcctggagtacatggggctcatctatcctggtgactctgacaccaaatacagcccgtccttccaaggccaggtcaccatctcagtcgacaagtccgtcagcactgcctacttgcaatggagcagtctgaagccctcggacagcgccgtgtatttttgtgcgagacatgacgtgggatattgcaccgaccggacttgcgcaaagtggcctgaatacttccagcattggggccagggcaccctggtcaccgtctcctcaggtggaggcggttcaggcggaggtggctctggcggtggcggatcgcagtctgtgttgacgcagccgccctcagtgtctgcggccccaggacagaaggtcaccatctcctgctctggaagcagctccaacattgggaataattatgtatcctggtaccagcagctcccaggaacagcccccaaactcctcatctatgatcacaccaatcggcccgcaggggtccctgaccgattctctggctccaagtctggcacctcagcctccctggccatcagtgggttccggtccgaggatgaggctgattattactgtgcctcctgggactacaccctctcgggctgggtgttcggcggagggaccaagctgaccgtcctaggtgggaagcctatcccgaaccctctgttgggtctcgatagtaccaatggggccgcaaccacgacgccagcgccgcgaccaccaacaccggcgcccaccatcgcgttgcagcccctgtccctgcgcccagaggcgtgccggccagcggcggggggcgcagtgcacacgagggggctggacttcgcctgtgatttttgggtgctggtggtggttggtggagtcctggcttgctatagcttgctagtaacagtggcctttattattttctgggtggaggacgtggtgtgctgccactcaatctacggcaagaagaagggtgatatcgacacctaccgatacataggctcttccgggacaggctgcgtggtcatagtgggcaggatcgtcttgtccggatccggcactagtgcgcccatcacggcgtacgcccagcagacgagaggcctcctagggtgtataatcaccagcctgactggccgggacaaaaaccaagtggagggtgaggtccagatcgtgtcaactgctacccaaaccttcctggcaacgtgcatcaatggggtatgctgggcagtctaccacggggccggaacgaggaccatcgcatcacccaagggtcctgtcatccagatgtataccaatgtggaccaagaccttgtgggctggcccgctcctcaaggttcccgctcattgacaccctgtacctgcggctcctcggacctttacctggtcacgaggcacgccgatgtcattcccgtgcgccggcgaggtgatagcaggggtagcctgctttcgccccggcccatttcctacttgaaaggctcctcggggggtccgctgttgtgccccgcgggacacgccgtgggcctattcagggccgcggtgtgcacccgtggagtggctaaagcggtggactttatccctgtggagaacctagagacaaccatgagatccccggtgttcacggacaactcctctccaccagcagtcaccctgacgcacccaatcaccaaaatcgatagggaggttctctaccaggagttcgatgagatggaagagtgctctcagcactatccctacgatgtgcccgattacgctaggagtaagaggagcaggctcctgcacagtgactacatgaacatgactccccgccgccccgggcccacccgcaagcattaccagccctatgccccaccacgcgacttcgcagcctatcgctccaaacggggcagaaagaaactcctgtatatattcaaacaaccatttatgagaccagtacaaactactcaagaggaagatggctgtagctgccgatttccagaagaagaagaaggaggatgtgaactgagagtgaagttcagcaggagcgcagacgcccccgcgtacaagcagggccagaaccagctctataacgagctcaatctaggacgaagagaggagtacgatgttttggacaagagacgtggccgggaccctgagatggggggaaagccgagaaggaagaaccctcaggaaggcctgtacaatgaactgcagaaagataagatggcggaggcctacagtgagattgggatgaaaggcgagcgccggaggggcaaggggcacgatggcctttaccagggtctcagtacagccaccaaggacacctacgacgcccttcacatgcaggccctgccccctcgctaa

SEQ ID NO: 2 - DNA, 2571 bp, Artificial Sequence
  synthetic polynucleotide
atggccttaccagtgaccgccttgctcctgccgctggccttgctgctccacgccgccaggccgaaatacctattgcctacggcagccgctggattgttattactcgcggcccagccggccatggcccaggtgcagctggtgcagtctggggcagaggtgaaaaagcccggggagtctctgaagatctcctgtaagggttctggatacagctttaccagctactggatcgcctgggtgcgccagatgcccgggaaaggcctggagtacatggggctcatctatcctggtgactctgacaccaaatacagcccgtccttccaaggccaggtcaccatctcagtcgacaagtccgtcagcactgcctacttgcaatggagcagtctgaagccctcggacagcgccgtgtatttttgtgcgagacatgacgtgggatattgcaccgaccggacttgcgcaaagtggcctgaatacttccagcattggggccagggcaccctggtcaccgtctcctcaggtggaggcggttcaggcggaggtggctctggcggtggcggatcgcagtctgtgttgacgcagccgccctcagtgtctgcggccccaggacagaaggtcaccatctcctgctctggaagcagctccaacattgggaataattatgtatcctggtaccagcagctcccaggaacagcccccaaactcctcatctatgatcacaccaatcggcccgcaggggtccctgaccgattctctggctccaagtctggcacctcagcctccctggccatcagtgggttccggtccgaggatgaggctgattattactgtgcctcctgggactacaccctctcgggctgggtgttcggcggagggaccaagctgaccgtcctaggtgggaagcctatcccgaaccctctgttgggtctcgatagtaccaatggggccgcaaccacgacgccagcgccgcgaccaccaacaccggcgcccaccatcgcgttgcagcccctgtccctgcgcccagaggcgtgccggccagcggcggggggcgcagtgcacacgagggggctggacttcgcctgtgatttttgggtgctggtggtggttggtggagtcctggcttgctatagcttgctagtaacagtggcctttattattttctgggtgaggagtaagaggagcaggctcctgcacagtgactacatgaacatgactccccgccgccccgggcccacccgcaagcattaccagccctatgccccaccacgcgacttcgcagcctatcgctccgaggacgtggtgtgctgccactcaatctacggcaagaagaagggtgatatcgacacctaccgatacataggctcttccgggacaggctgcgtggtcatagtgggcaggatcgtcttgtccggatccggcactagtgcgcccatcacggcgtacgcccagcagacgagaggcctcctagggtgtataatcaccagcctgactggccgggacaaaaaccaagtggagggtgaggtccagatcgtgtcaactgctacccaaaccttcctggcaacgtgcatcaatggggtatgctgggcagtctaccacggggccggaacgaggaccatcgcatcacccaagggtcctgtcatccagatgtataccaatgtggaccaagaccttgtgggctggcccgctcctcaaggttcccgctcattgacaccctgtacctgcggctcctcggacctttacctggtcacgaggcacgccgatgtcattcccgtgcgccggcgaggtgatagcaggggtagcctgctttcgccccggcccatttcctacttgaaaggctcctcggggggtccgctgttgtgccccgcgggacacgccgtgggcctattcagggccgcggtgtgcacccgtggagtggctaaagcggtggactttatccctgtggagaacctagagacaaccatgagatccccggtgttcacggacaactcctctccaccagcagtcaccctgacgcacccaatcaccaaaatcgatagggaggttctctaccaggagttcgatgagatggaagagtgctctcagcactatccctacgatgtgcccgattacgctaaacggggcagaaagaaactcctgtatatattcaaacaaccatttatgagaccagtacaaactactcaagaggaagatggctgtagctgccgatttccagaagaagaagaaggaggatgtgaactgagagtgaagttcagcaggagcgcagacgcccccgcgtacaagcagggccagaaccagctctataacgagctcaatctaggacgaagagaggagtacgatgttttggacaagagacgtggccgggaccctgagatggggggaaagccgagaaggaagaaccctcaggaaggcctgtacaatgaactgcagaaagataagatggcggaggcctacagtgagattgggatgaaaggcgagcgccggaggggcaaggggcacgatggcctttaccagggtctcagtacagccaccaaggacacctacgacgcccttcacatgcaggccctgccccctcgctaa

SEQ ID NO: 3 - DNA, 2571 bp, Artificial Sequence
  synthetic polynucleotide
atggccttaccagtgaccgccttgctcctgccgctggccttgctgctccacgccgccaggccgaaatacctattgcctacggcagccgctggattgttattactcgcggcccagccggccatggcccaggtgcagctggtgcagtctggggcagaggtgaaaaagcccggggagtctctgaagatctcctgtaagggttctggatacagctttaccagctactggatcgcctgggtgcgccagatgcccgggaaaggcctggagtacatggggctcatctatcctggtgactctgacaccaaatacagcccgtccttccaaggccaggtcaccatctcagtcgacaagtccgtcagcactgcctacttgcaatggagcagtctgaagccctcggacagcgccgtgtatttttgtgcgagacatgacgtgggatattgcaccgaccggacttgcgcaaagtggcctgaatacttccagcattggggccagggcaccctggtcaccgtctcctcaggtggaggcggttcaggcggaggtggctctggcggtggcggatcgcagtctgtgttgacgcagccgccctcagtgtctgcggccccaggacagaaggtcaccatctcctgctctggaagcagctccaacattgggaataattatgtatcctggtaccagcagctcccaggaacagcccccaaactcctcatctatgatcacaccaatcggcccgcaggggtccctgaccgattctctggctccaagtctggcacctcagcctccctggccatcagtgggttccggtccgaggatgaggctgattattactgtgcctcctgggactacaccctctcgggctgggtgttcggcggagggaccaagctgaccgtcctaggtgggaagcctatcccgaaccctctgttgggtctcgatagtaccaatggggccgcaaccacgacgccagcgccgcgaccaccaacaccggcgcccaccatcgcgttgcagcccctgtccctgcgcccagaggcgtgccggccagcggcggggggcgcagtgcacacgagggggctggacttcgcctgtgatttttgggtgctggtggtggttggtggagtcctggcttgctatagcttgctagtaacagtggcctttattattttctgggtgaggagtaagaggagcaggctcctgcacagtgactacatgaacatgactccccgccgccccgggcccacccgcaagcattaccagccctatgccccaccacgcgacttcgcagcctatcgctccaaacggggcagaaagaaactcctgtatatattcaaacaaccatttatgagaccagtacaaactactcaagaggaagatggctgtagctgccgatttccagaagaagaagaaggaggatgtgaactggaggacgtggtgtgctgccactcaatctacggcaagaagaagggtgatatcgacacctaccgatacataggctcttccgggacaggctgcgtggtcatagtgggcaggatcgtcttgtccggatccggcactagtgcgcccatcacggcgtacgcccagcagacgagaggcctcctagggtgtataatcaccagcctgactggccgggacaaaaaccaagtggagggtgaggtccagatcgtgtcaactgctacccaaaccttcctggcaacgtgcatcaatggggtatgctgggcagtctaccacggggccggaacgaggaccatcgcatcacccaagggtcctgtcatccagatgtataccaatgtggaccaagaccttgtgggctggcccgctcctcaaggttcccgctcattgacaccctgtacctgcggctcctcggacctttacctggtcacgaggcacgccgatgtcattcccgtgcgccggcgaggtgatagcaggggtagcctgctttcgccccggcccatttcctacttgaaaggctcctcggggggtccgctgttgtgccccgcgggacacgccgtgggcctattcagggccgcggtgtgcacccgtggagtggctaaagcggtggactttatccctgtggagaacctagagacaaccatgagatccccggtgttcacggacaactcctctccaccagcagtcaccctgacgcacccaatcaccaaaatcgatagggaggttctctaccaggagttcgatgagatggaagagtgctctcagcactatccctacgatgtgcccgattacgctagagtgaagttcagcaggagcgcagacgcccccgcgtacaagcagggccagaaccagctctataacgagctcaatctaggacgaagagaggagtacgatgttttggacaagagacgtggccgggaccctgagatggggggaaagccgagaaggaagaaccctcaggaaggcctgtacaatgaactgcagaaagataagatggcggaggcctacagtgagattgggatgaaaggcgagcgccggaggggcaaggggcacgatggcctttaccagggtctcagtacagccaccaaggacacctacgacgcccttcacatgcaggccctgccccctcgctaa

SEQ ID NO: 4 - DNA, 1749 bp, Artificial Sequence
  synthetic polynucleotide
atggccttaccagtgaccgccttgctcctgccgctggccttgctgctccacgccgccaggccgaaatacctattgcctacggcagccgctggattgttattactcgcggcccagccggccatggcccaggtgcagctggtgcagtctggggcagaggtgaaaaagcccggggagtctctgaagatctcctgtaagggttctggatacagctttaccagctactggatcgcctgggtgcgccagatgcccgggaaaggcctggagtacatggggctcatctatcctggtgactctgacaccaaatacagcccgtccttccaaggccaggtcaccatctcagtcgacaagtccgtcagcactgcctacttgcaatggagcagtctgaagccctcggacagcgccgtgtatttttgtgcgagacatgacgtgggatattgcaccgaccggacttgcgcaaagtggcctgaatacttccagcattggggccagggcaccctggtcaccgtctcctcaggtggaggcggttcaggcggaggtggctctggcggtggcggatcgcagtctgtgttgacgcagccgccctcagtgtctgcggccccaggacagaaggtcaccatctcctgctctggaagcagctccaacattgggaataattatgtatcctggtaccagcagctcccaggaacagcccccaaactcctcatctatgatcacaccaatcggcccgcaggggtccctgaccgattctctggctccaagtctggcacctcagcctccctggccatcagtgggttccggtccgaggatgaggctgattattactgtgcctcctgggactacaccctctcgggctgggtgttcggcggagggaccaagctgaccgtcctaggtgggaagcctatcccgaaccctctgttgggtctcgatagtaccaatggggccgcaaccacgacgccagcgccgcgaccaccaacaccggcgcccaccatcgcgttgcagcccctgtccctgcgcccagaggcgtgccggccagcggcggggggcgcagtgcacacgagggggctggacttcgcctgtgatttttgggtgctggtggtggttggtggagtcctggcttgctatagcttgctagtaacagtggcctttattattttctgggtgaggagtaagaggagcaggctcctgcacagtgactacatgaacatgactccccgccgccccgggcccacccgcaagcattaccagccctatgccccaccacgcgacttcgcagcctatcgctccaaacggggcagaaagaaactcctgtatatattcaaacaaccatttatgagaccagtacaaactactcaagaggaagatggctgtagctgccgatttccagaagaagaagaaggaggatgtgaactgagagtgaagttcagcaggagcgcagacgcccccgcgtacaagcagggccagaaccagctctataacgagctcaatctaggacgaagagaggagtacgatgttttggacaagagacgtggccgggaccctgagatggggggaaagccgagaaggaagaaccctcaggaaggcctgtacaatgaactgcagaaagataagatggcggaggcctacagtgagattgggatgaaaggcgagcgccggaggggcaaggggcacgatggcctttaccagggtctcagtacagccaccaaggacacctacgacgcccttcacatgcaggccctgccccctcgctaa

SEQ ID NO: 5 - DNA, 2322 bp, Artificial Sequence
  synthetic polynucleotide
atggccttaccagtgaccgccttgctcctgccgctggccttgctgctccacgccgccaggccgaaatacctattgcctacggcagccgctggattgttattactcgcggcccagccggccatggcccaggtgcagctggtgcagtctggggcagaggtgaaaaagcccggggagtctctgaagatctcctgtaagggttctggatacagctttaccagctactggatcgcctgggtgcgccagatgcccgggaaaggcctggagtacatggggctcatctatcctggtgactctgacaccaaatacagcccgtccttccaaggccaggtcaccatctcagtcgacaagtccgtcagcactgcctacttgcaatggagcagtctgaagccctcggacagcgccgtgtatttttgtgcgagacatgacgtgggatattgcaccgaccggacttgcgcaaagtggcctgaatacttccagcattggggccagggcaccctggtcaccgtctcctcaggtggaggcggttcaggcggaggtggctctggcggtggcggatcgcagtctgtgttgacgcagccgccctcagtgtctgcggccccaggacagaaggtcaccatctcctgctctggaagcagctccaacattgggaataattatgtatcctggtaccagcagctcccaggaacagcccccaaactcctcatctatgatcacaccaatcggcccgcaggggtccctgaccgattctctggctccaagtctggcacctcagcctccctggccatcagtgggttccggtccgaggatgaggctgattattactgtgcctcctgggactacaccctctcgggctgggtgttcggcggagggaccaagctgaccgtcctaggtgggaagcctatcccgaaccctctgttgggtctcgatagtaccaatggggccgcaaccacgacgccagcgccgcgaccaccaacaccggcgcccaccatcgcgttgcagcccctgtccctgcgcccagaggcgtgccggccagcggcggggggcgcagtgcacacgagggggctggacttcgcctgtgatttttgggtgctggtggtggttggtggagtcctggcttgctatagcttgctagtaacagtggcctttattattttctgggtggaggacgtggtgtgctgccactcaatctacggcaagaagaagggtgatatcgacacctaccgatacataggctcttccgggacaggctgcgtggtcatagtgggcaggatcgtcttgtccggatccggcactagtgcgcccatcacggcgtacgcccagcagacgagaggcctcctagggtgtataatcaccagcctgactggccgggacaaaaaccaagtggagggtgaggtccagatcgtgtcaactgctacccaaaccttcctggcaacgtgcatcaatggggtatgctgggcagtctaccacggggccggaacgaggaccatcgcatcacccaagggtcctgtcatccagatgtataccaatgtggaccaagaccttgtgggctggcccgctcctcaaggttcccgctcattgacaccctgtacctgcggctcctcggacctttacctggtcacgaggcacgccgatgtcattcccgtgcgccggcgaggtgatagcaggggtagcctgctttcgccccggcccatttcctacttgaaaggctcctcggggggtccgctgttgtgccccgcgggacacgccgtgggcctattcagggccgcggtgtgcacccgtggagtggctaaagcggtggactttatccctgtggagaacctagagacaaccatgagatccccggtgttcacggacaactcctctccaccagcagtcaccctgacgcacccaatcaccaaaatcgatagggaggttctctaccaggagttcgatgagatggaagagtgctctcagcactatccctacgatgtgcccgattacgctagagtgaagttcagcaggagcgcagacgcccccgcgtacaagcagggccagaaccagctctataacgagctcaatctaggacgaagagaggagtacgatgttttggacaagagacgtggccgggaccctgagatggggggaaagccgagaaggaagaaccctcaggaaggcctgtacaatgaactgcagaaagataagatggcggaggcctacagtgagattgggatgaaaggcgagcgccggaggggcaaggggcacgatggcctttaccagggtctcagtacagccaccaaggacacctacgacgcccttcacatgcaggccctgccccctcgctaa

SEQ ID NO: 6 - DNA, 1635 bp, Artificial Sequence
  synthetic polynucleotide
atggccctgcctgtgacagctctgctgctgcctctggccctgctgctgcatgctgctagacctcaggtgcagctgcaggaaagcggccctggcctcgtgaagcctagcgagacactgagcctgacctgcaccgtgtccggctacagcatcaccagcaactactggggctggatcagacagccccctggcaagggcctggaatggatgggctacatcacctacagcggcagcaccagctacaaccccagcctgaagtcccggatcaccatcagccgggacaccagcaagaaccagttctccctgaagctgagcagcgtgacagccgccgataccgccgtgtactactgcgccatcaccaccttctactattggggccagggcaccctcgtgaccgtgtctagcggaggcggaggatctggcggcggaggaagtggcggagggggctctgatatccagatgacccagagccccagcagcctgtctgccagcgtgggcgacagagtgaccatcacctgtagagccagccaggacatcggcaactacctgcggtggttccagcagaagccaggcaaggcccccaagctgctgatctccggcgccacaaatctggccgctggcgtgccaagcagattcagcggctctggcagcggctccgacttcaccctgaccatctctagcctgcagcccgaggacttcgccacctactactgcctgcagagcaaagagagcccctggaccttcggacagggcaccaaggtggaaatcaagcggacagaacaaaaactcatctcagaagaagatctgaatggggccgcaaccacgacgccagcgccgcgaccaccaacaccggcgcccaccatcgcgttgcagcccctgtccctgcgcccagaggcgtgccggccagcggcggggggcgcagtgcacacgagggggctggacttcgcctgtgatttttgggtgctggtggtggttggtggagtcctggcttgctatagcttgctagtaacagtggcctttattattttctgggtgaggagtaagaggagcaggctcctgcacagtgactacatgaacatgactccccgccgccccgggcccacccgcaagcattaccagccctatgccccaccacgcgacttcgcagcctatcgctccggcatcagtctgattgcggcgttagcggtagattacgttatcggcatggaaaacgccatgccgtggaacctgcctgccgatctcgcctggtttaaacgcaacaccttaaataaacccgtgattatgggccgccatacctgggaatcaatcggtcgtccgttgccaggacgcaaaaatattatcctcagcagtcaaccgagtacggacgatcgcgtaacgtgggtgaagtcggtggatgaagccatcgcggcgtgtggtgacgtaccagaaatcatggtgattggcggcggtcgcgttattgaacagttcttgccaaaagcgcaaaaactgtatctgacgcatatcgacgcagaagtggaaggcgacacccatttcccggattacgagccggatgactgggaatcggtattcagcgagttccacgatgctgatgcgcagaactctcacagctattgctttgagattctggagcggcgataa

SEQ ID NO: 7 - DNA, 63 bp, Artificial Sequence
  synthetic polynucleotide
atggccttaccagtgaccgccttgctcctgccgctggccttgctgctccacgccgccaggccg

SEQ ID NO: 8 - DNA, 828 bp, Artificial Sequence
  synthetic polynucleotide
aaatacctattgcctacggcagccgctggattgttattactcgcggcccagccggccatggcccaggtgcagctggtgcagtctggggcagaggtgaaaaagcccggggagtctctgaagatctcctgtaagggttctggatacagctttaccagctactggatcgcctgggtgcgccagatgcccgggaaaggcctggagtacatggggctcatctatcctggtgactctgacaccaaatacagcccgtccttccaaggccaggtcaccatctcagtcgacaagtccgtcagcactgcctacttgcaatggagcagtctgaagccctcggacagcgccgtgtatttttgtgcgagacatgacgtgggatattgcaccgaccggacttgcgcaaagtggcctgaatacttccagcattggggccagggcaccctggtcaccgtctcctcaggtggaggcggttcaggcggaggtggctctggcggtggcggatcgcagtctgtgttgacgcagccgccctcagtgtctgcggccccaggacagaaggtcaccatctcctgctctggaagcagctccaacattgggaataattatgtatcctggtaccagcagctcccaggaacagcccccaaactcctcatctatgatcacaccaatcggcccgcaggggtccctgaccgattctctggctccaagtctggcacctcagcctccctggccatcagtgggttccggtccgaggatgaggctgattattactgtgcctcctgggactacaccctctcgggctgggtgttcggcggagggaccaagctgaccgtcctaggt

SEQ ID NO: 9 - DNA, 42 bp, Artificial Sequence
  synthetic polynucleotide
gggaagcctatcccgaaccctctgttgggtctcgatagtacc

SEQ ID NO: 10 - DNA, 135 bp, Artificial Sequence
  synthetic polynucleotide
accacgacgccagcgccgcgaccaccaacaccggcgcccaccatcgcgttgcagcccctgtccctgcgcccagaggcgtgccggccagcggcggggggcgcagtgcacacgagggggctggacttcgcctgtgat

SEQ ID NO: 11 - DNA, 81 bp, Artificial Sequence
  synthetic polynucleotide
ttttgggtgctggtggtggttggtggagtcctggcttgctatagcttgctagtaacagtggcctttattattttctgggtg

SEQ ID NO: 12 - DNA, 30 bp, Artificial Sequence
  synthetic polynucleotide
gaggacgtggtgtgctgccactcaatctac

SEQ ID NO: 13 - DNA, 24 bp, Artificial Sequence
  synthetic polynucleotide
cactcaatctacggcaagaagaag

SEQ ID NO: 14 - DNA, 18 bp, Artificial Sequence
  synthetic polynucleotide
gacacctaccgatacata

SEQ ID NO: 15 - DNA, 39 bp, Artificial Sequence
  synthetic polynucleotide
ggctgcgtggtcatagtgggcaggatcgtcttgtccgga

SEQ ID NO: 16 - DNA, 567 bp, Artificial Sequence
  synthetic polynucleotide
gcgcccatcacggcgtacgcccagcagacgagaggcctcctagggtgtataatcaccagcctgactggccgggacaaaaaccaagtggagggtgaggtccagatcgtgtcaactgctacccaaaccttcctggcaacgtgcatcaatggggtatgctgggcagtctaccacggggccggaacgaggaccatcgcatcacccaagggtcctgtcatccagatgtataccaatgtggaccaagaccttgtgggctggcccgctcctcaaggttcccgctcattgacaccctgtacctgcggctcctcggacctttacctggtcacgaggcacgccgatgtcattcccgtgcgccggcgaggtgatagcaggggtagcctgctttcgccccggcccatttcctacttgaaaggctcctcggggggtccgctgttgtgccccgcgggacacgccgtgggcctattcagggccgcggtgtgcacccgtggagtggctaaagcggtggactttatccctgtggagaacctagagacaaccatgagatccccggtgttcacggacaactcctct

SEQ ID NO: 17 - DNA, 42 bp, Artificial Sequence
  synthetic polynucleotide
ctctaccaggagttcgatgagatggaagagtgctctcagcac

SEQ ID NO: 18 - DNA, 27 bp, Artificial Sequence
  synthetic polynucleotide
tatccctacgatgtgcccgattacgct

SEQ ID NO: 19 - DNA, 123 bp, Artificial Sequence
  synthetic polynucleotide
aggagtaagaggagcaggctcctgcacagtgactacatgaacatgactccccgccgccccgggcccacccgcaagcattaccagccctatgccccaccacgcgacttcgcagcctatcgctcc

SEQ ID NO: 20 - DNA, 126 bp, Artificial Sequence
  synthetic polynucleotide
aaacggggcagaaagaaactcctgtatatattcaaacaaccatttatgagaccagtacaaactactcaagaggaagatggctgtagctgccgatttccagaagaagaagaaggaggatgtgaactg

SEQ ID NO: 21 - DNA, 336 bp, Artificial Sequence
  synthetic polynucleotide
agagtgaagttcagcaggagcgcagacgcccccgcgtacaagcagggccagaaccagctctataacgagctcaatctaggacgaagagaggagtacgatgttttggacaagagacgtggccgggaccctgagatggggggaaagccgagaaggaagaaccctcaggaaggcctgtacaatgaactgcagaaagataagatggcggaggcctacagtgagattgggatgaaaggcgagcgccggaggggcaaggggcacgatggcctttaccagggtctcagtacagccaccaaggacacctacgacgcccttcacatgcaggccctgccccctcgc

SEQ ID NO: 22 - DNA, 339 bp, Artificial Sequence
  synthetic polynucleotide
caggtgcagctgcaggaaagcggccctggcctcgtgaagcctagcgagacactgagcctgacctgcaccgtgtccggctacagcatcaccagcaactactggggctggatcagacagccccctggcaagggcctggaatggatgggctacatcacctacagcggcagcaccagctacaaccccagcctgaagtcccggatcaccatcagccgggacaccagcaagaaccagttctccctgaagctgagcagcgtgacagccgccgataccgccgtgtactactgcgccatcaccaccttctactattggggccagggcaccctcgtgaccgtgtctagc

SEQ ID NO: 23 - DNA, 45 bp, Artificial Sequence
  synthetic polynucleotide
ggaggcggaggatctggcggcggaggaagtggcggagggggctct

SEQ ID NO: 24 - DNA, 327 bp, Artificial Sequence
  synthetic polynucleotide
gatatccagatgacccagagccccagcagcctgtctgccagcgtgggcgacagagtgaccatcacctgtagagccagccaggacatcggcaactacctgcggtggttccagcagaagccaggcaaggcccccaagctgctgatctccggcgccacaaatctggccgctggcgtgccaagcagattcagcggctctggcagcggctccgacttcaccctgaccatctctagcctgcagcccgaggacttcgccacctactactgcctgcagagcaaagagagcccctggaccttcggacagggcaccaaggtggaaatcaagcggaca

SEQ ID NO: 25 - DNA, 30 bp, Artificial Sequence
  synthetic polynucleotide
gaacaaaaactcatctcagaagaagatctg

SEQ ID NO: 26 - DNA, 474 bp, Artificial Sequence
  synthetic polynucleotide
atcagtctgattgcggcgttagcggtagattacgttatcggcatggaaaacgccatgccgtggaacctgcctgccgatctcgcctggtttaaacgcaacaccttaaataaacccgtgattatgggccgccatacctgggaatcaatcggtcgtccgttgccaggacgcaaaaatattatcctcagcagtcaaccgagtacggacgatcgcgtaacgtgggtgaagtcggtggatgaagccatcgcggcgtgtggtgacgtaccagaaatcatggtgattggcggcggtcgcgttattgaacagttcttgccaaaagcgcaaaaactgtatctgacgcatatcgacgcagaagtggaaggcgacacccatttcccggattacgagccggatgactgggaatcggtattcagcgagttccacgatgctgatgcgcagaactctcacagctattgctttgagattctggagcggcga

SEQ ID NO: 27 - DNA, 19 bp, Artificial Sequence
  synthetic oligonucleotide
atggccttaccagtgaccg

SEQ ID NO: 28 - DNA, 16 bp, Artificial Sequence
  synthetic oligonucleotide
ttagcgagggggcagg

SEQ ID NO: 29 - DNA, 55 bp, Artificial Sequence
  synthetic oligonucleotide
ccgctaacgccgcaatcagactgatgccggagcgataggctgcgaagtcgcgtgg

SEQ ID NO: 30 - DNA, 25 bp, Artificial Sequence
  synthetic oligonucleotide
atcagtctgattgcggcgttagcgg

SEQ ID NO: 31 - DNA, 49 bp, Artificial Sequence
  synthetic oligonucleotide
tgcgctcctgctgaacttcactctagcgtaatcgggcacatcgtaggga

SEQ ID NO: 32 - DNA, 25 bp, Artificial Sequence
  synthetic oligonucleotide
agagtgaagttcagcaggagcgcag

SEQ ID NO: 33 - DNA, 60 bp, Artificial Sequence
  synthetic oligonucleotide
cctgcaggtcgactctagagtcgcggccgcactagtttagcgagggggcagggcctgcat

SEQ ID NO: 34 - protein, 855 aa, Artificial Sequence
  synthetic polypeptide
ALPVTALLLPLALLLHAARPKYLLPTAAAGLLLLAAQPAMAQVQLVQSGAEVKKPGESLKISCKGSGYSFTSYWIAWVRQMPGKGLEYMGLIYPGDSDTKYSPSFQGQVTISVDKSVSTAYLQWSSLKPSDSAVYFCARHDVGYCTDRTCAKWPEYFQHWGQGTLVTVSSGGGGSGGGGSGGGGSQSVLTQPPSVSAAPGQKVTISCSGSSSNIGNNYVSWYQQLPGTAPKLLIYDHTNRPAGVPDRFSGSKSGTSASLAISGFRSEDEADYYCASWDYTLSGWVFGGGTKLTVLGGKPIPNPLLGLDSTNGAATTTPAPRPPTPAPTIALQPLSLRPEACRPAAGGAVHTRGLDFACDFWVLVVVGGVLACYSLLVTVAFIIFWVEDVVCCHSIYGKKKGDIDTYRYIGSSGTGCVVIVGRIVLSGSGTSAPITAYAQQTRGLLGCIITSLTGRDKNQVEGEVQIVSTATQTFLATCINGVCWAVYHGAGTRTIASPKGPVIQMYTNVDQDLVGWPAPQGSRSLTPCTCGSSDLYLVTRHADVIPVRRRGDSRGSLLSPRPISYLKGSSGGPLLCPAGHAVGLFRAAVCTRGVAKAVDFIPVENLETTMRSPVFTDNSSPPAVTLTHPITKIDREVLYQEFDEMEECSQHYPYDVPDYARSKRSRLLHSDYMNMTPRRPGPTRKHYQPYAPPRDFAAYRSKRGRKKLLYIFKQPFMRPVQTTQEEDGCSCRFPEEEEGGCELRVKFSRSADAPAYKQGQNQLYNELNLGRREEYDVLDKRRGRDPEMGGKPRRKNPQEGLYNELQKDKMAEAYSEIGMKGERRRGKGHDGLYQGLSTATKDTYDALHMQALPPR

SEQ ID NO: 35 - protein, 855 aa, Artificial Sequence
  synthetic polypeptide
ALPVTALLLPLALLLHAARPKYLLPTAAAGLLLLAAQPAMAQVQLVQSGAEVKKPGESLKISCKGSGYSFTSYWIAWVRQMPGKGLEYMGLIYPGDSDTKYSPSFQGQVTISVDKSVSTAYLQWSSLKPSDSAVYFCARHDVGYCTDRTCAKWPEYFQHWGQGTLVTVSSGGGGSGGGGSGGGGSQSVLTQPPSVSAAPGQKVTISCSGSSSNIGNNYVSWYQQLPGTAPKLLIYDHTNRPAGVPDRFSGSKSGTSASLAISGFRSEDEADYYCASWDYTLSGWVFGGGTKLTVLGGKPIPNPLLGLDSTNGAATTTPAPRPPTPAPTIALQPLSLRPEACRPAAGGAVHTRGLDFACDFWVLVVVGGVLACYSLLVTVAFIIFWVRSKRSRLLHSDYMNMTPRRPGPTRKHYQPYAPPRDFAAYRSEDVVCCHSIYGKKKGDIDTYRYIGSSGTGCVVIVGRIVLSGSGTSAPITAYAQQTRGLLGCIITSLTGRDKNQVEGEVQIVSTATQTFLATCINGVCWAVYHGAGTRTIASPKGPVIQMYTNVDQDLVGWPAPQGSRSLTPCTCGSSDLYLVTRHADVIPVRRRGDSRGSLLSPRPISYLKGSSGGPLLCPAGHAVGLFRAAVCTRGVAKAVDFIPVENLETTMRSPVFTDNSSPPAVTLTHPITKIDREVLYQEFDEMEECSQHYPYDVPDYAKRGRKKLLYIFKQPFMRPVQTTQEEDGCSCRFPEEEEGGCELRVKFSRSADAPAYKQGQNQLYNELNLGRREEYDVLDKRRGRDPEMGGKPRRKNPQEGLYNELQKDKMAEAYSEIGMKGERRRGKGHDGLYQGLSTATKDTYDALHMQALPPR

SEQ ID NO: 36 - protein, 855 aa, Artificial Sequence
  synthetic polypeptide
ALPVTALLLPLALLLHAARPKYLLPTAAAGLLLLAAQPAMAQVQLVQSGAEVKKPGESLKISCKGSGYSFTSYWIAWVRQMPGKGLEYMGLIYPGDSDTKYSPSFQGQVTISVDKSVSTAYLQWSSLKPSDSAVYFCARHDVGYCTDRTCAKWPEYFQHWGQGTLVTVSSGGGGSGGGGSGGGGSQSVLTQPPSVSAAPGQKVTISCSGSSSNIGNNYVSWYQQLPGTAPKLLIYDHTNRPAGVPDRFSGSKSGTSASLAISGFRSEDEADYYCASWDYTLSGWVFGGGTKLTVLGGKPIPNPLLGLDSTNGAATTTPAPRPPTPAPTIALQPLSLRPEACRPAAGGAVHTRGLDFACDFWVLVVVGGVLACYSLLVTVAFIIFWVRSKRSRLLHSDYMNMTPRRPGPTRKHYQPYAPPRDFAAYRSKRGRKKLLYIFKQPFMRPVQTTQEEDGCSCRFPEEEEGGCELEDVVCCHSIYGKKKGDIDTYRYIGSSGTGCVVIVGRIVLSGSGTSAPITAYAQQTRGLLGCIITSLTGRDKNQVEGEVQIVSTATQTFLATCINGVCWAVYHGAGTRTIASPKGPVIQMYTNVDQDLVGWPAPQGSRSLTPCTCGSSDLYLVTRHADVIPVRRRGDSRGSLLSPRPISYLKGSSGGPLLCPAGHAVGLFRAAVCTRGVAKAVDFIPVENLETTMRSPVFTDNSSPPAVTLTHPITKIDREVLYQEFDEMEECSQHYPYDVPDYARVKFSRSADAPAYKQGQNQLYNELNLGRREEYDVLDKRRGRDPEMGGKPRRKNPQEGLYNELQKDKMAEAYSEIGMKGERRRGKGHDGLYQGLSTATKDTYDALHMQALPPR

SEQ ID NO: 37 - protein, 581 aa, Artificial Sequence
  synthetic polypeptide
ALPVTALLLPLALLLHAARPKYLLPTAAAGLLLLAAQPAMAQVQLVQSGAEVKKPGESLKISCKGSGYSFTSYWIAWVRQMPGKGLEYMGLIYPGDSDTKYSPSFQGQVTISVDKSVSTAYLQWSSLKPSDSAVYFCARHDVGYCTDRTCAKWPEYFQHWGQGTLVTVSSGGGGSGGGGSGGGGSQSVLTQPPSVSAAPGQKVTISCSGSSSNIGNNYVSWYQQLPGTAPKLLIYDHTNRPAGVPDRFSGSKSGTSASLAISGFRSEDEADYYCASWDYTLSGWVFGGGTKLTVLGGKPIPNPLLGLDSTNGAATTTPAPRPPTPAPTIALQPLSLRPEACRPAAGGAVHTRGLDFACDFWVLVVVGGVLACYSLLVTVAFIIFWVRSKRSRLLHSDYMNMTPRRPGPTRKHYQPYAPPRDFAAYRSKRGRKKLLYIFKQPFMRPVQTTQEEDGCSCRFPEEEEGGCELRVKFSRSADAPAYKQGQNQLYNELNLGRREEYDVLDKRRGRDPEMGGKPRRKNPQEGLYNELQKDKMAEAYSEIGMKGERRRGKGHDGLYQGLSTATKDTYDALHMQALPPR

SEQ ID NO: 38 - protein, 772 aa, Artificial Sequence
  synthetic polypeptide
ALPVTALLLPLALLLHAARPKYLLPTAAAGLLLLAAQPAMAQVQLVQSGAEVKKPGESLKISCKGSGYSFTSYWIAWVRQMPGKGLEYMGLIYPGDSDTKYSPSFQGQVTISVDKSVSTAYLQWSSLKPSDSAVYFCARHDVGYCTDRTCAKWPEYFQHWGQGTLVTVSSGGGGSGGGGSGGGGSQSVLTQPPSVSAAPGQKVTISCSGSSSNIGNNYVSWYQQLPGTAPKLLIYDHTNRPAGVPDRFSGSKSGTSASLAISGFRSEDEADYYCASWDYTLSGWVFGGGTKLTVLGGKPIPNPLLGLDSTNGAATTTPAPRPPTPAPTIALQPLSLRPEACRPAAGGAVHTRGLDFACDFWVLVVVGGVLACYSLLVTVAFIIFWVEDVVCCHSIYGKKKGDIDTYRYIGSSGTGCVVIVGRIVLSGSGTSAPITAYAQQTRGLLGCIITSLTGRDKNQVEGEVQIVSTATQTFLATCINGVCWAVYHGAGTRTIASPKGPVIQMYTNVDQDLVGWPAPQGSRSLTPCTCGSSDLYLVTRHADVIPVRRRGDSRGSLLSPRPISYLKGSSGGPLLCPAGHAVGLFRAAVCTRGVAKAVDFIPVENLETTMRSPVFTDNSSPPAVTLTHPITKIDREVLYQEFDEMEECSQHYPYDVPDYARVKFSRSADAPAYKQGQNQLYNELNLGRREEYDVLDKRRGRDPEMGGKPRRKNPQEGLYNELQKDKMAEAYSEIGMKGERRRGKGHDGLYQGLSTATKDTYDALHMQALPPR

SEQ ID NO: 39 - protein, 543 aa, Artificial Sequence
  synthetic polypeptide
ALPVTALLLPLALLLHAARPQVQLQESGPGLVKPSETLSLTCTVSGYSITSNYWGWIRQPPGKGLEWMGYITYSGSTSYNPSLKSRITISRDTSKNQFSLKLSSVTAADTAVYYCAITTFYYWGQGTLVTVSSGGGGSGGGGSGGGGSDIQMTQSPSSLSASVGDRVTITCRASQDIGNYLRWFQQKPGKAPKLLISGATNLAAGVPSRFSGSGSGSDFTLTISSLQPEDFATYYCLQSKESPWTFGQGTKVEIKRTEQKLISEEDLNGAATTTPAPRPPTPAPTIALQPLSLRPEACRPAAGGAVHTRGLDFACDFWVLVVVGGVLACYSLLVTVAFIIFWVRSKRSRLLHSDYMNMTPRRPGPTRKHYQPYAPPRDFAAYRSGISLIAALAVDYVIGMENAMPWNLPADLAWFKRNTLNKPVIMGRHTWESIGRPLPGRKNIILSSQPSTDDRVTWVKSVDEAIAACGDVPEIMVIGGGRVIEQFLPKAQKLYLTHIDAEVEGDTHFPDYEPDDWESVFSEFHDADAQNSHSYCFEILERR

SEQ ID NO: 40 - protein, 21 aa, Artificial Sequence
  synthetic polypeptide
MALPVTALLLPLALLLHAARP

SEQ ID NO: 41 - protein, 276 aa, Artificial Sequence
  synthetic polypeptide
KYLLPTAAAGLLLLAAQPAMAQVQLVQSGAEVKKPGESLKISCKGSGYSFTSYWIAWVRQMPGKGLEYMGLIYPGDSDTKYSPSFQGQVTISVDKSVSTAYLQWSSLKPSDSAVYFCARHDVGYCTDRTCAKWPEYFQHWGQGTLVTVSSGGGGSGGGGSGGGGSQSVLTQPPSVSAAPGQKVTISCSGSSSNIGNNYVSWYQQLPGTAPKLLIYDHTNRPAGVPDRFSGSKSGTSASLAISGFRSEDEADYYCASWDYTLSGWVFGGGTKLTVLG

SEQ ID NO: 42 - protein, 14 aa, Artificial Sequence
  synthetic polypeptide
GKPIPNPLLGLDST

SEQ ID NO: 43 - protein, 45 aa, Artificial Sequence
  synthetic polypeptide
TTTPAPRPPTPAPTIALQPLSLRPEACRPAAGGAVHTRGLDFACD

SEQ ID NO: 44 - protein, 27 aa, Artificial Sequence
  synthetic polypeptide
FWVLVVVGGVLACYSLLVTVAFIIFWV

SEQ ID NO: 45 - protein, 10 aa, Artificial Sequence
  synthetic polypeptide
EDVVCCHSIY

SEQ ID NO: 46 - protein, 8 aa, Artificial Sequence
  synthetic polypeptide
HSIYGKKK

SEQ ID NO: 47 - protein, 6 aa, Artificial Sequence
  synthetic polypeptide
DTYRYI

SEQ ID NO: 48 - protein, 13 aa, Artificial Sequence
  synthetic polypeptide
GCVVIVGRIVLSG

SEQ ID NO: 49 - protein, 189 aa, Artificial Sequence
  synthetic polypeptide
APITAYAQQTRGLLGCIITSLTGRDKNQVEGEVQIVSTATQTFLATCINGVCWAVYHGAGTRTIASPKGPVIQMYTNVDQDLVGWPAPQGSRSLTPCTCGSSDLYLVTRHADVIPVRRRGDSRGSLLSPRPISYLKGSSGGPLLCPAGHAVGLFRAAVCTRGVAKAVDFIPVENLETTMRSPVFTDNSS

SEQ ID NO: 50 - protein, 14 aa, Artificial Sequence
  synthetic polypeptide
LYQEFDEMEECSQH

SEQ ID NO: 51 - protein, 9 aa, Artificial Sequence
  synthetic polypeptide
YPYDVPDYA

SEQ ID NO: 52 - protein, 41 aa, Artificial Sequence
  synthetic polypeptide
RSKRSRLLHSDYMNMTPRRPGPTRKHYQPYAPPRDFAAYRS

SEQ ID NO: 53 - protein, 42 aa, Artificial Sequence
  synthetic polypeptide
KRGRKKLLYIFKQPFMRPVQTTQEEDGCSCRFPEEEEGGCEL

SEQ ID NO: 54 - protein, 112 aa, Artificial Sequence
  synthetic polypeptide
RVKFSRSADAPAYKQGQNQLYNELNLGRREEYDVLDKRRGRDPEMGGKPRRKNPQEGLYNELQKDKMAEAYSEIGMKGERRRGKGHDGLYQGLSTATKDTYDALHMQALPPR

SEQ ID NO: 55 - protein, 113 aa, Artificial Sequence
  synthetic polypeptide
QVQLQESGPGLVKPSETLSLTCTVSGYSITSNYWGWIRQPPGKGLEWMGYITYSGSTSYNPSLKSRITISRDTSKNQFSLKLSSVTAADTAVYYCAITTFYYWGQGTLVTVSS

SEQ ID NO: 56 - protein, 15 aa, Artificial Sequence
  synthetic polypeptide
GGGGSGGGGSGGGGS

SEQ ID NO: 57 - protein, 109 aa, Artificial Sequence
  synthetic polypeptide
DIQMTQSPSSLSASVGDRVTITCRASQDIGNYLRWFQQKPGKAPKLLISGATNLAAGVPSRFSGSGSGSDFTLTISSLQPEDFATYYCLQSKESPWTFGQGTKVEIKRT

SEQ ID NO: 58 - protein, 10 aa, Artificial Sequence
  synthetic polypeptide
EQKLISEEDL

SEQ ID NO: 59 - protein, 158 aa, Artificial Sequence
  synthetic polypeptide
ISLIAALAVDYVIGMENAMPWNLPADLAWFKRNTLNKPVIMGRHTWESIGRPLPGRKNIILSSQPSTDDRVTWVKSVDEAIAACGDVPEIMVIGGGRVIEQFLPKAQKLYLTHIDAEVEGDTHFPDYEPDDWESVFSEFHDADAQNSHSYCFEILERR

SEQ ID NO: 60 - DNA, 1329 bp, Artificial Sequence
  synthetic polynucleotide
atggccttaccagtgaccgccttgctcctgccgctggccttgctgctccacgccgccaggccggacatccagatgacacagactacatcctccctgtctgcctctctgggagacagagtcaccatcagttgcagggcaagtcaggacattagtaaatatttaaattggtatcagcagaaaccagatggaactgttaaactcctgatctaccatacatcaagattacactcaggagtcccatcaaggttcagtggcagtgggtctggaacagattattctctcaccattagcaacctggagcaagaagatattgccacttacttttgccaacagggtaatacgcttccgtacacgttcggaggcggcaccaagctggagatcacaggtggcggtggctcgggcggtggtgggtcgggtggcggcggatctgaggtgaaactgcaggagtcaggacctggcctggtggcgccctcacagagcctgtccgtcacatgcactgtctcaggggtctcattacccgactatggtgtaagctggattcgccagcctccacgaaagggtctggagtggctgggagtaatatggggtagtgaaaccacatactataattcagctctcaaatccagactgaccatcatcaaggacaactccaagagccaagttttcttaaaaatgaacagtctgcaaactgatgacacagccatttactactgtgccaaacattattactacggtggtagctatgctatggactactggggccaaggaacctcagtcaccgtctcctcagggaagcctatcccgaaccctctgttgggtctcgatagtaccaatggggccgcaaccacgacgccagcgccgcgaccaccaacaccggcgcccaccatcgcgttgcagcccctgtccctgcgcccagaggcgtgccggccagcggcggggggcgcagtgcacacgagggggctggacttcgcctgtgatttttgggtgctggtggtggttggtggagtcctggcttgctatagcttgctagtaacagtggcctttattattttctgggtgaggagtaagaggagcaggctcctgcacagtgactacatgaacatgactccccgccgccccgggcccacccgcaagcattaccagccctatgccccaccacgcgacttcgcagcctatcgctccgggggtaccgaattcagcgggtcaggcggatctggaagtggtggtggagaacttgatgaattggtatacttactagatgggccaggttatgaccctatacattgcgatgtagtgacaaggggcggcagccaccttttcaatttttaa

SEQ ID NO: 61 - DNA, 1455 bp, Artificial Sequence
  synthetic polynucleotide
atggccttaccagtgaccgccttgctcctgccgctggccttgctgctccacgccgccaggccggacatccagatgacacagactacatcctccctgtctgcctctctgggagacagagtcaccatcagttgcagggcaagtcaggacattagtaaatatttaaattggtatcagcagaaaccagatggaactgttaaactcctgatctaccatacatcaagattacactcaggagtcccatcaaggttcagtggcagtgggtctggaacagattattctctcaccattagcaacctggagcaagaagatattgccacttacttttgccaacagggtaatacgcttccgtacacgttcggaggcggcaccaagctggagatcacaggtggcggtggctcgggcggtggtgggtcgggtggcggcggatctgaggtgaaactgcaggagtcaggacctggcctggtggcgccctcacagagcctgtccgtcacatgcactgtctcaggggtctcattacccgactatggtgtaagctggattcgccagcctccacgaaagggtctggagtggctgggagtaatatggggtagtgaaaccacatactataattcagctctcaaatccagactgaccatcatcaaggacaactccaagagccaagttttcttaaaaatgaacagtctgcaaactgatgacacagccatttactactgtgccaaacattattactacggtggtagctatgctatggactactggggccaaggaacctcagtcaccgtctcctcagggaagcctatcccgaaccctctgttgggtctcgatagtaccaatggggccgcaaccacgacgccagcgccgcgaccaccaacaccggcgcccaccatcgcgttgcagcccctgtccctgcgcccagaggcgtgccggccagcggcggggggcgcagtgcacacgagggggctggacttcgcctgtgatttttgggtgctggtggtggttggtggagtcctggcttgctatagcttgctagtaacagtggcctttattattttctgggtgaggagtaagaggagcaggctcctgcacagtgactacatgaacatgactccccgccgccccgggcccacccgcaagcattaccagccctatgccccaccacgcgacttcgcagcctatcgctccaaacggggcagaaagaaactcctgtatatattcaaacaaccatttatgagaccagtacaaactactcaagaggaagatggctgtagctgccgatttccagaagaagaagaaggaggatgtgaactggggggtaccgaattcagcgggtcaggcggatctggaagtggtggtggagaacttgatgaattggtatacttactagatgggccaggttatgaccctatacattgcgatgtagtgacaaggggcggcagccaccttttcaatttttaa

SEQ ID NO: 62 - DNA, 1968 bp, Artificial Sequence
  synthetic polynucleotide
atgattcatcttggtcacatcctcttcttgctgctgttgccagttgctgccgcacaaacaaccccaggtgagaggtcaagtcttcccgccttctatccgggcacaagcgggagttgtagtgggtgtggatctttgtcccttcctatatacatctgggctcctctggctggcacttgcggagtgcttctgctgagtctggttattaccaaacggggcagaaagaaactcctgtatatattcaaacaaccatttatgagaccagtacaaactactcaagaggaagatggctgtagctgccgatttccagaagaagaagaaggaggatgtgaactgggttctgttgttattgttggtagaattattttatctggtagtggtagtatcacggcctactcccaacagacgcggggcctacttggttgcatcatcactagcctcacaggccgggacaagaaccaggtcgaaggggaggttcaagtggtttctaccgcaacacaatctttcctggcgacctgcgtcaacggcgtgtgctggactgtctaccatggcgctggctcgaagaccctagccggtccaaaaggtccaatcacccaaatgtacaccaatgtagaccaggacctcgtcggctggcaggcgcctccaggggcgcgctccttgacaccatgcacctgtggcagctcggacctttacttggtcacgagacatgctgatgtcattccggtgcgccggcgaggcgacagcaggggaagtctactctcccccaggcccgtctcctacctgaaaggctccgcaggtggtccattgctttgcccttcggggcacgctgtgggcatcttccgggctgctgtgtgcacccggggggtcgcgaaggcggtggacttcgtgcccgttgagtctatggaaactaccatgcggtctagagtgaagttcagcaggagcgcagacgcccccgcgtacaagcagggccagaaccagctctataacgagctcaatctaggacgaagagaggagtacgatgttttggacaagagacgtggccgggaccctgagatggggggaaagccgagaaggaagaaccctcaggaaggcctgtacaatgaactgcagaaagataagatggcggaggcctacagtgagattgggatgaaaggcgagcgccggaggggcaaggggcacgatggcctttaccagggtctcagtacagccaccaaggacacctacgacgcccttcacatgcaggccctgccccctcgcggcatggtgagcaagggcgaggaggataacatggccatcatcaaggagttcatgcgcttcaaggtgcacatggagggctccgtgaacggccacgagttcgagatcgagggcgagggcgagggccgcccctacgagggcacccagaccgccaagctgaaggtgaccaagggtggccccctgcccttcgcctgggacatcctgtcccctcagttcatgtacggctccaaggcctacgtgaagcaccccgccgacatccccgactacttgaagctgtccttccccgagggcttcaagtgggagcgcgtgatgaacttcgaggacggcggcgtggtgaccgtgacccaggactcctccctgcaggacggcgagttcatctacaaggtgaagctgcgcggcaccaacttcccctccgacggccccgtaatgcagaagaagaccatgggctgggaggcctcctccgagcggatgtaccccgaggacggcgccctgaagggcgagatcaagcagaggctgaagctgaaggacggcggccactacgacgctgaggtcaagaccacctacaaggccaagaagcccgtgcagctgcccggcgcctacaacgtcaacatcaagttggacatcacctcccacaacgaggactacaccatcgtggaacagtacgaacgcgccgagggccgccactccaccggcggcatggacgagctgtacaagtaa

SEQ ID NO: 63 - DNA, 1968 bp, Artificial Sequence
  synthetic polynucleotide
atgattcatcttggtcacatcctcttcttgctgctgttgccagttgctgccgcacaaacaaccccaggtgagaggtcaagtcttcccgccttctatccgggcacaagcgggagttgtagtgggtgtggatctttgtcccttcctatatacatctgggctcctctggctggcacttgcggagtgcttctgctgagtctggttattaccaaacggggcagaaagaaactcctgtatatattcaaacaaccatttatgagaccagtacaaactactcaagaggaagatggctgtagctgccgatttccagaagaagaagaaggaggatgtgaactgagagtgaagttcagcaggagcgcagacgcccccgcgtacaagcagggccagaaccagctctataacgagctcaatctaggacgaagagaggagtacgatgttttggacaagagacgtggccgggaccctgagatggggggaaagccgagaaggaagaaccctcaggaaggcctgtacaatgaactgcagaaagataagatggcggaggcctacagtgagattgggatgaaaggcgagcgccggaggggcaaggggcacgatggcctttaccagggtctcagtacagccaccaaggacacctacgacgcccttcacatgcaggccctgccccctcgcggttctgttgttattgttggtagaattattttatctggtagtggtagtatcacggcctactcccaacagacgcggggcctacttggttgcatcatcactagcctcacaggccgggacaagaaccaggtcgaaggggaggttcaagtggtttctaccgcaacacaatctttcctggcgacctgcgtcaacggcgtgtgctggactgtctaccatggcgctggctcgaagaccctagccggtccaaaaggtccaatcacccaaatgtacaccaatgtagaccaggacctcgtcggctggcaggcgcctccaggggcgcgctccttgacaccatgcacctgtggcagctcggacctttacttggtcacgagacatgctgatgtcattccggtgcgccggcgaggcgacagcaggggaagtctactctcccccaggcccgtctcctacctgaaaggctccgcaggtggtccattgctttgcccttcggggcacgctgtgggcatcttccgggctgctgtgtgcacccggggggtcgcgaaggcggtggacttcgtgcccgttgagtctatggaaactaccatgcggtctggcatggtgagcaagggcgaggaggataacatggccatcatcaaggagttcatgcgcttcaaggtgcacatggagggctccgtgaacggccacgagttcgagatcgagggcgagggcgagggccgcccctacgagggcacccagaccgccaagctgaaggtgaccaagggtggccccctgcccttcgcctgggacatcctgtcccctcagttcatgtacggctccaaggcctacgtgaagcaccccgccgacatccccgactacttgaagctgtccttccccgagggcttcaagtgggagcgcgtgatgaacttcgaggacggcggcgtggtgaccgtgacccaggactcctccctgcaggacggcgagttcatctacaaggtgaagctgcgcggcaccaacttcccctccgacggccccgtaatgcagaagaagaccatgggctgggaggcctcctccgagcggatgtaccccgaggacggcgccctgaagggcgagatcaagcagaggctgaagctgaaggacggcggccactacgacgctgaggtcaagaccacctacaaggccaagaagcccgtgcagctgcccggcgcctacaacgtcaacatcaagttggacatcacctcccacaacgaggactacaccatcgtggaacagtacgaacgcgccgagggccgccactccaccggcggcatggacgagctgtacaagtaa

SEQ ID NO: 64 - DNA, 1842 bp, Artificial Sequence
  synthetic polynucleotide
atgattcatcttggtcacatcctcttcttgctgctgttgccagttgctgccgcacaaacaaccccaggtgagaggtcaagtcttcccgccttctatccgggcacaagcgggagttgtagtgggtgtggatctttgtcccttcctatatacatctgggctcctctggctggcacttgcggagtgcttctgctgagtctggttattaccggttctgttgttattgttggtagaattattttatctggtagtggtagtatcacggcctactcccaacagacgcggggcctacttggttgcatcatcactagcctcacaggccgggacaagaaccaggtcgaaggggaggttcaagtggtttctaccgcaacacaatctttcctggcgacctgcgtcaacggcgtgtgctggactgtctaccatggcgctggctcgaagaccctagccggtccaaaaggtccaatcacccaaatgtacaccaatgtagaccaggacctcgtcggctggcaggcgcctccaggggcgcgctccttgacaccatgcacctgtggcagctcggacctttacttggtcacgagacatgctgatgtcattccggtgcgccggcgaggcgacagcaggggaagtctactctcccccaggcccgtctcctacctgaaaggctccgcaggtggtccattgctttgcccttcggggcacgctgtgggcatcttccgggctgctgtgtgcacccggggggtcgcgaaggcggtggacttcgtgcccgttgagtctatggaaactaccatgcggtctagagtgaagttcagcaggagcgcagacgcccccgcgtacaagcagggccagaaccagctctataacgagctcaatctaggacgaagagaggagtacgatgttttggacaagagacgtggccgggaccctgagatggggggaaagccgagaaggaagaaccctcaggaaggcctgtacaatgaactgcagaaagataagatggcggaggcctacagtgagattgggatgaaaggcgagcgccggaggggcaaggggcacgatggcctttaccagggtctcagtacagccaccaaggacacctacgacgcccttcacatgcaggccctgccccctcgcggcatggtgagcaagggcgaggaggataacatggccatcatcaaggagttcatgcgcttcaaggtgcacatggagggctccgtgaacggccacgagttcgagatcgagggcgagggcgagggccgcccctacgagggcacccagaccgccaagctgaaggtgaccaagggtggccccctgcccttcgcctgggacatcctgtcccctcagttcatgtacggctccaaggcctacgtgaagcaccccgccgacatccccgactacttgaagctgtccttccccgagggcttcaagtgggagcgcgtgatgaacttcgaggacggcggcgtggtgaccgtgacccaggactcctccctgcaggacggcgagttcatctacaaggtgaagctgcgcggcaccaacttcccctccgacggccccgtaatgcagaagaagaccatgggctgggaggcctcctccgagcggatgtaccccgaggacggcgccctgaagggcgagatcaagcagaggctgaagctgaaggacggcggccactacgacgctgaggtcaagaccacctacaaggccaagaagcccgtgcagctgcccggcgcctacaacgtcaacatcaagttggacatcacctcccacaacgaggactacaccatcgtggaacagtacgaacgcgccgagggccgccactccaccggcggcatggacgagctgtacaagtaa

SEQ ID NO: 65 - DNA, 1842 bp, Artificial Sequence
  synthetic polynucleotide
atgattcatcttggtcacatcctcttcttgctgctgttgccagttgctgccgcacaaacaaccccaggtgagaggtcaagtcttcccgccttctatccgggcacaagcgggagttgtagtgggtgtggatctttgtcccttcctatatacatctgggctcctctggctggcacttgcggagtgcttctgctgagtctggttattaccagagtgaagttcagcaggagcgcagacgcccccgcgtacaagcagggccagaaccagctctataacgagctcaatctaggacgaagagaggagtacgatgttttggacaagagacgtggccgggaccctgagatggggggaaagccgagaaggaagaaccctcaggaaggcctgtacaatgaactgcagaaagataagatggcggaggcctacagtgagattgggatgaaaggcgagcgccggaggggcaaggggcacgatggcctttaccagggtctcagtacagccaccaaggacacctacgacgcccttcacatgcaggccctgccccctcgcggttctgttgttattgttggtagaattattttatctggtagtggtagtatcacggcctactcccaacagacgcggggcctacttggttgcatcatcactagcctcacaggccgggacaagaaccaggtcgaaggggaggttcaagtggtttctaccgcaacacaatctttcctggcgacctgcgtcaacggcgtgtgctggactgtctaccatggcgctggctcgaagaccctagccggtccaaaaggtccaatcacccaaatgtacaccaatgtagaccaggacctcgtcggctggcaggcgcctccaggggcgcgctccttgacaccatgcacctgtggcagctcggacctttacttggtcacgagacatgctgatgtcattccggtgcgccggcgaggcgacagcaggggaagtctactctcccccaggcccgtctcctacctgaaaggctccgcaggtggtccattgctttgcccttcggggcacgctgtgggcatcttccgggctgctgtgtgcacccggggggtcgcgaaggcggtggacttcgtgcccgttgagtctatggaaactaccatgcggtctggcatggtgagcaagggcgaggaggataacatggccatcatcaaggagttcatgcgcttcaaggtgcacatggagggctccgtgaacggccacgagttcgagatcgagggcgagggcgagggccgcccctacgagggcacccagaccgccaagctgaaggtgaccaagggtggccccctgcccttcgcctgggacatcctgtcccctcagttcatgtacggctccaaggcctacgtgaagcaccccgccgacatccccgactacttgaagctgtccttccccgagggcttcaagtgggagcgcgtgatgaacttcgaggacggcggcgtggtgaccgtgacccaggactcctccctgcaggacggcgagttcatctacaaggtgaagctgcgcggcaccaacttcccctccgacggccccgtaatgcagaagaagaccatgggctgggaggcctcctccgagcggatgtaccccgaggacggcgccctgaagggcgagatcaagcagaggctgaagctgaaggacggcggccactacgacgctgaggtcaagaccacctacaaggccaagaagcccgtgcagctgcccggcgcctacaacgtcaacatcaagttggacatcacctcccacaacgaggactacaccatcgtggaacagtacgaacgcgccgagggccgccactccaccggcggcatggacgagctgtacaagtaa

SEQ ID NO: 66 - DNA, 3945 bp, Artificial Sequence
  synthetic polynucleotide
atggccttaccagtgaccgccttgctcctgccgctggccttgctgctccacgccgccaggccggacatccagatgacacagactacatcctccctgtctgcctctctgggagacagagtcaccatcagttgcagggcaagtcaggacattagtaaatatttaaattggtatcagcagaaaccagatggaactgttaaactcctgatctaccatacatcaagattacactcaggagtcccatcaaggttcagtggcagtgggtctggaacagattattctctcaccattagcaacctggagcaagaagatattgccacttacttttgccaacagggtaatacgcttccgtacacgttcggaggcggcaccaagctggagatcacaggtggcggtggctcgggcggtggtgggtcgggtggcggcggatctgaggtgaaactgcaggagtcaggacctggcctggtggcgccctcacagagcctgtccgtcacatgcactgtctcaggggtctcattacccgactatggtgtaagctggattcgccagcctccacgaaagggtctggagtggctgggagtaatatggggtagtgaaaccacatactataattcagctctcaaatccagactgaccatcatcaaggacaactccaagagccaagttttcttaaaaatgaacagtctgcaaactgatgacacagccatttactactgtgccaaacattattactacggtggtagctatgctatggactactggggccaaggaacctcagtcaccgtctcctcagggaagcctatcccgaaccctctgttgggtctcgatagtaccaatggggccgcaaccacgacgccagcgccgcgaccaccaacaccggcgcccaccatcgcgttgcagcccctgtccctgcgcccagaggcgtgccggccagcggcggggggcgcagtgcacacgagggggctggacttcgcctgtgatttttgggtgctggtggtggttggtggagtcctggcttgctatagcttgctagtaacagtggcctttattattttctgggtgaggagtaagaggagcaggctcctgcacagtgactacatgaacatgactccccgccgccccgggcccacccgcaagcattaccagccctatgccccaccacgcgacttcgcagcctatcgctccggctcaggaagctcttccgacgaagaagaagcgcgcgagctgatcgagcgtgcgaaggaggctgcggaacgcgcgcaagaagctgctgagcgtaccggtgatccgcgcgtgcgtgaactcgctcgtgagctgaaacgcctggctcaggaagctgctgaagaagtgaagcgtgacccgtcttcctccgatgtgaacgaagcgctcaaactcatcgtggaagctatcgaggcggctgtggacgcgctcgaagcggctgaacgcaccggcgacccggaggttcgtgagctggcgcgtgagctcgtgcgcctcgcggttgaggctgcggaggaggtgcaacgtaacccatcctcctctgacgtgaatgaggctctccacagcatagtttacgctattgaagctgccatttttgcattggaagctgccgaaaggactggtgacccggaagtgagagaactcgcccgagagcttgtaagactggcggttgaggcggctgaagaagtccagcgaaatccgtccagccggaatgtcgagcacgcactgatgaggattgtgttggccatttacctggcagaagaaaatctccgcgaagctgaggagtctggcgatccggaaaaacgtgaaaaggctcgcgaacgtgttcgtgaggcggtggaacgtgcggaagaggttcagcgtgatccatccggttggctgaatcatggcagtggagagggcagaggaagtctgctaacatgcggtgacgtcgaggagaatcctggcccaatgattcatcttggtcacatcctcttcttgctgctgttgccagttgctgccgcacaaacaaccccaggtgagaggtcaagtcttcccgccttctatccgggcacaagcgggagttgtagtgggtgtggatctttgtcccttcctatatacatctgggctcctctggctggcacttgcggagtgcttctgctgagtctggttattaccaaacggggcagaaagaaactcctgtatatattcaaacaaccatttatgagaccagtacaaactactcaagaggaagatggctgtagctgccgatttccagaagaagaagaaggaggatgtgaactgggctgcgtggtcatagtgggcaggatcgtcttgtccggatccggcactagtgcgcccatcacggcgtacgcccagcagacgagaggcctcctagggtgtataatcaccagcctgactggccgggacaaaaaccaagtggagggtgaggtccagatcgtgtcaactgctacccaaaccttcctggcaacgtgcatcaatggggtatgctgggcagtctaccacggggccggaacgaggaccatcgcatcacccaagggtcctgtcatccagatgtataccaatgtggaccaagaccttgtgggctggcccgctcctcaaggttcccgctcattgacaccctgtacctgcggctcctcggacctttacctggtcacgaggcacgccgatgtcattcccgtgcgccggcgaggtgatagcaggggtagcctgctttcgccccggcccatttcctacttgaaaggctccgcggggggtccgctgttgtgccccgcgggacacgccgtgggcctattcagggccgcggtgtgcacccgtggagtggctaaagcggtggactttatccctgtggagaacctagagacaaccatgagatccccggtgttcacggacaactcctctagagtgaagttcagcaggagcgcagacgcccccgcgtacaagcagggccagaaccagctctataacgagctcaatctaggacgaagagaggagtacgatgttttggacaagagacgtggccgggaccctgagatggggggaaagccgagaaggaagaaccctcaggaaggcctgtacaatgaactgcagaaagataagatggcggaggcctacagtgagattgggatgaaaggcgagcgccggaggggcaaggggcacgatggcctttaccagggtctcagtacagccaccaaggacacctacgacgcccttcacatgcaggccctgccccctcgcggcatggtgagcaagggcgaggaggataacatggccatcatcaaggagttcatgcgcttcaaggtgcacatggagggctccgtgaacggccacgagttcgagatcgagggcgagggcgagggccgcccctacgagggcacccagaccgccaagctgaaggtgaccaagggtggccccctgcccttcgcctgggacatcctgtcccctcagttcatgtacggctccaaggcctacgtgaagcaccccgccgacatccccgactacttgaagctgtccttccccgagggcttcaagtgggagcgcgtgatgaacttcgaggacggcggcgtggtgaccgtgacccaggactcctccctgcaggacggcgagttcatctacaaggtgaagctgcgcggcaccaacttcccctccgacggccccgtaatgcagaagaagaccatgggctgggaggcctcctccgagcggatgtaccccgaggacggcgccctgaagggcgagatcaagcagaggctgaagctgaaggacggcggccactacgacgctgaggtcaagaccacctacaaggccaagaagcccgtgcagctgcccggcgcctacaacgtcaacatcaagttggacatcacctcccacaacgaggactacaccatcgtggaacagtacgaacgcgccgagggccgccactccaccggcggcatggacgagctgtacaagtaa

SEQ ID NO: 67 - DNA, 4071 bp, Artificial Sequence
  synthetic polynucleotide
atggccttaccagtgaccgccttgctcctgccgctggccttgctgctccacgccgccaggccggacatccagatgacacagactacatcctccctgtctgcctctctgggagacagagtcaccatcagttgcagggcaagtcaggacattagtaaatatttaaattggtatcagcagaaaccagatggaactgttaaactcctgatctaccatacatcaagattacactcaggagtcccatcaaggttcagtggcagtgggtctggaacagattattctctcaccattagcaacctggagcaagaagatattgccacttacttttgccaacagggtaatacgcttccgtacacgttcggaggcggcaccaagctggagatcacaggtggcggtggctcgggcggtggtgggtcgggtggcggcggatctgaggtgaaactgcaggagtcaggacctggcctggtggcgccctcacagagcctgtccgtcacatgcactgtctcaggggtctcattacccgactatggtgtaagctggattcgccagcctccacgaaagggtctggagtggctgggagtaatatggggtagtgaaaccacatactataattcagctctcaaatccagactgaccatcatcaaggacaactccaagagccaagttttcttaaaaatgaacagtctgcaaactgatgacacagccatttactactgtgccaaacattattactacggtggtagctatgctatggactactggggccaaggaacctcagtcaccgtctcctcagggaagcctatcccgaaccctctgttgggtctcgatagtaccaatggggccgcaaccacgacgccagcgccgcgaccaccaacaccggcgcccaccatcgcgttgcagcccctgtccctgcgcccagaggcgtgccggccagcggcggggggcgcagtgcacacgagggggctggacttcgcctgtgatttttgggtgctggtggtggttggtggagtcctggcttgctatagcttgctagtaacagtggcctttattattttctgggtgaggagtaagaggagcaggctcctgcacagtgactacatgaacatgactccccgccgccccgggcccacccgcaagcattaccagccctatgccccaccacgcgacttcgcagcctatcgctccaaacggggcagaaagaaactcctgtatatattcaaacaaccatttatgagaccagtacaaactactcaagaggaagatggctgtagctgccgatttccagaagaagaagaaggaggatgtgaactgggctcaggaagctcttccgacgaagaagaagcgcgcgagctgatcgagcgtgcgaaggaggctgcggaacgcgcgcaagaagctgctgagcgtaccggtgatccgcgcgtgcgtgaactcgctcgtgagctgaaacgcctggctcaggaagctgctgaagaagtgaagcgtgacccgtcttcctccgatgtgaacgaagcgctcaaactcatcgtggaagctatcgaggcggctgtggacgcgctcgaagcggctgaacgcaccggcgacccggaggttcgtgagctggcgcgtgagctcgtgcgcctcgcggttgaggctgcggaggaggtgcaacgtaacccatcctcctctgacgtgaatgaggctctccacagcatagtttacgctattgaagctgccatttttgcattggaagctgccgaaaggactggtgacccggaagtgagagaactcgcccgagagcttgtaagactggcggttgaggcggctgaagaagtccagcgaaatccgtccagccggaatgtcgagcacgcactgatgaggattgtgttggccatttacctggcagaagaaaatctccgcgaagctgaggagtctggcgatccggaaaaacgtgaaaaggctcgcgaacgtgttcgtgaggcggtggaacgtgcggaagaggttcagcgtgatccatccggttggctgaatcatggcagtggagagggcagaggaagtctgctaacatgcggtgacgtcgaggagaatcctggcccaatgattcatcttggtcacatcctcttcttgctgctgttgccagttgctgccgcacaaacaaccccaggtgagaggtcaagtcttcccgccttctatccgggcacaagcgggagttgtagtgggtgtggatctttgtcccttcctatatacatctgggctcctctggctggcacttgcggagtgcttctgctgagtctggttattaccaaacggggcagaaagaaactcctgtatatattcaaacaaccatttatgagaccagtacaaactactcaagaggaagatggctgtagctgccgatttccagaagaagaagaaggaggatgtgaactgggctgcgtggtcatagtgggcaggatcgtcttgtccggatccggcactagtgcgcccatcacggcgtacgcccagcagacgagaggcctcctagggtgtataatcaccagcctgactggccgggacaaaaaccaagtggagggtgaggtccagatcgtgtcaactgctacccaaaccttcctggcaacgtgcatcaatggggtatgctgggcagtctaccacggggccggaacgaggaccatcgcatcacccaagggtcctgtcatccagatgtataccaatgtggaccaagaccttgtgggctggcccgctcctcaaggttcccgctcattgacaccctgtacctgcggctcctcggacctttacctggtcacgaggcacgccgatgtcattcccgtgcgccggcgaggtgatagcaggggtagcctgctttcgccccggcccatttcctacttgaaaggctccgcggggggtccgctgttgtgccccgcgggacacgccgtgggcctattcagggccgcggtgtgcacccgtggagtggctaaagcggtggactttatccctgtggagaacctagagacaaccatgagatccccggtgttcacggacaactcctctagagtgaagttcagcaggagcgcagacgcccccgcgtacaagcagggccagaaccagctctataacgagctcaatctaggacgaagagaggagtacgatgttttggacaagagacgtggccgggaccctgagatggggggaaagccgagaaggaagaaccctcaggaaggcctgtacaatgaactgcagaaagataagatggcggaggcctacagtgagattgggatgaaaggcgagcgccggaggggcaaggggcacgatggcctttaccagggtctcagtacagccaccaaggacacctacgacgcccttcacatgcaggccctgccccctcgcggcatggtgagcaagggcgaggaggataacatggccatcatcaaggagttcatgcgcttcaaggtgcacatggagggctccgtgaacggccacgagttcgagatcgagggcgagggcgagggccgcccctacgagggcacccagaccgccaagctgaaggtgaccaagggtggccccctgcccttcgcctgggacatcctgtcccctcagttcatgtacggctccaaggcctacgtgaagcaccccgccgacatccccgactacttgaagctgtccttccccgagggcttcaagtgggagcgcgtgatgaacttcgaggacggcggcgtggtgaccgtgacccaggactcctccctgcaggacggcgagttcatctacaaggtgaagctgcgcggcaccaacttcccctccgacggccccgtaatgcagaagaagaccatgggctgggaggcctcctccgagcggatgtaccccgaggacggcgccctgaagggcgagatcaagcagaggctgaagctgaaggacggcggccactacgacgctgaggtcaagaccacctacaaggccaagaagcccgtgcagctgcccggcgcctacaacgtcaacatcaagttggacatcacctcccacaacgaggactacaccatcgtggaacagtacgaacgcgccgagggccgccactccaccggcggcatggacgagctgtacaagtaa

SEQ ID NO: 68 - DNA, 3957 bp, Artificial Sequence
  synthetic polynucleotide
atggccttaccagtgaccgccttgctcctgccgctggccttgctgctccacgccgccaggccggacatccagatgacacagactacatcctccctgtctgcctctctgggagacagagtcaccatcagttgcagggcaagtcaggacattagtaaatatttaaattggtatcagcagaaaccagatggaactgttaaactcctgatctaccatacatcaagattacactcaggagtcccatcaaggttcagtggcagtgggtctggaacagattattctctcaccattagcaacctggagcaagaagatattgccacttacttttgccaacagggtaatacgcttccgtacacgttcggaggcggcaccaagctggagatcacaggtggcggtggctcgggcggtggtgggtcgggtggcggcggatctgaggtgaaactgcaggagtcaggacctggcctggtggcgccctcacagagcctgtccgtcacatgcactgtctcaggggtctcattacccgactatggtgtaagctggattcgccagcctccacgaaagggtctggagtggctgggagtaatatggggtagtgaaaccacatactataattcagctctcaaatccagactgaccatcatcaaggacaactccaagagccaagttttcttaaaaatgaacagtctgcaaactgatgacacagccatttactactgtgccaaacattattactacggtggtagctatgctatggactactggggccaaggaacctcagtcaccgtctcctcagggaagcctatcccgaaccctctgttgggtctcgatagtaccaatggggccgcaaccacgacgccagcgccgcgaccaccaacaccggcgcccaccatcgcgttgcagcccctgtccctgcgcccagaggcgtgccggccagcggcggggggcgcagtgcacacgagggggctggacttcgcctgtgatttttgggtgctggtggtggttggtggagtcctggcttgctatagcttgctagtaacagtggcctttattattttctgggtgaggagtaagaggagcaggctcctgcacagtgactacatgaacatgactccccgccgccccgggcccacccgcaagcattaccagccctatgccccaccacgcgacttcgcagcctatcgctccggctcaggaagcgatatcgagaagctttgcaaaaaagctgaagaagaggcaaaggaggcgcaagagaaagctgatgagttgcggcaacggcaccccgacagccaggctgctgaggatgctgaggacttggcaaatctggcggtggccgctgtcttgacggcttgcttgttggcccaagaacatccaaacgctgacattgcaaagctttgcattaaggccgcgtccgaagcggctgaagcagcttctaaggcagccgagctggcgcaacggcatcctgactcccaagcggcgagggacgctataaaactcgcatcacaagcagccagagctgtaatcctcgctattatgctcgcagccgaaaacccaaacgctgatattgccaaactgtgtataaaggcggctagtgaagccgcagaagctgcaagcaaagcagcagaacttgcccaacgccaccccgactcccaggcggctagagatgctataaaacttgcttctcaggctgcggaggcggtagaacgagcgatctggctggcagcagagaaccccaacgctgacattgccaaaaagtgtatcaaggcggcttccgaagccgccgaggaggccagcaaagcggcggaagaggcacagagacatccggactcacagaaagcacgcgacgagattaaagaggctagtcaaaaagcagaggaggtaaaagaacgctgtaagtccggcagtggagagggcagaggaagtctgctaacatgcggtgacgtcgaggagaatcctggcccaatgattcatcttggtcacatcctcttcttgctgctgttgccagttgctgccgcacaaacaaccccaggtgagaggtcaagtcttcccgccttctatccgggcacaagcgggagttgtagtgggtgtggatctttgtcccttcctatatacatctgggctcctctggctggcacttgcggagtgcttctgctgagtctggttattaccaaacggggcagaaagaaactcctgtatatattcaaacaaccatttatgagaccagtacaaactactcaagaggaagatggctgtagctgccgatttccagaagaagaagaaggaggatgtgaactgggctgcgtggtcatagtgggcaggatcgtcttgtccggatccggcactagtgcgcccatcacggcgtacgcccagcagacgagaggcctcctagggtgtataatcaccagcctgactggccgggacaaaaaccaagtggagggtgaggtccagatcgtgtcaactgctacccaaaccttcctggcaacgtgcatcaatggggtatgctgggcagtctaccacggggccggaacgaggaccatcgcatcacccaagggtcctgtcatccagatgtataccaatgtggaccaagaccttgtgggctggcccgctcctcaaggttcccgctcattgacaccctgtacctgcggctcctcggacctttacctggtcacgaggcacgccgatgtcattcccgtgcgccggcgaggtgatagcaggggtagcctgctttcgccccggcccatttcctacttgaaaggctccgcggggggtccgctgttgtgccccgcgggacacgccgtgggcctattcagggccgcggtgtgcacccgtggagtggctaaagcggtggactttatccctgtggagaacctagagacaaccatgagatccccggtgttcacggacaactcctctagagtgaagttcagcaggagcgcagacgcccccgcgtacaagcagggccagaaccagctctataacgagctcaatctaggacgaagagaggagtacgatgttttggacaagagacgtggccgggaccctgagatggggggaaagccgagaaggaagaaccctcaggaaggcctgtacaatgaactgcagaaagataagatggcggaggcctacagtgagattgggatgaaaggcgagcgccggaggggcaaggggcacgatggcctttaccagggtctcagtacagccaccaaggacacctacgacgcccttcacatgcaggccctgccccctcgcggcatggtgagcaagggcgaggaggataacatggccatcatcaaggagttcatgcgcttcaaggtgcacatggagggctccgtgaacggccacgagttcgagatcgagggcgagggcgagggccgcccctacgagggcacccagaccgccaagctgaaggtgaccaagggtggccccctgcccttcgcctgggacatcctgtcccctcagttcatgtacggctccaaggcctacgtgaagcaccccgccgacatccccgactacttgaagctgtccttccccgagggcttcaagtgggagcgcgtgatgaacttcgaggacggcggcgtggtgaccgtgacccaggactcctccctgcaggacggcgagttcatctacaaggtgaagctgcgcggcaccaacttcccctccgacggccccgtaatgcagaagaagaccatgggctgggaggcctcctccgagcggatgtaccccgaggacggcgccctgaagggcgagatcaagcagaggctgaagctgaaggacggcggccactacgacgctgaggtcaagaccacctacaaggccaagaagcccgtgcagctgcccggcgcctacaacgtcaacatcaagttggacatcacctcccacaacgaggactacaccatcgtggaacagtacgaacgcgccgagggccgccactccaccggcggcatggacgagctgtacaagtaa

SEQ ID NO: 69 - DNA, 4083 bp, Artificial Sequence
  synthetic polynucleotide
atggccttaccagtgaccgccttgctcctgccgctggccttgctgctccacgccgccaggccggacatccagatgacacagactacatcctccctgtctgcctctctgggagacagagtcaccatcagttgcagggcaagtcaggacattagtaaatatttaaattggtatcagcagaaaccagatggaactgttaaactcctgatctaccatacatcaagattacactcaggagtcccatcaaggttcagtggcagtgggtctggaacagattattctctcaccattagcaacctggagcaagaagatattgccacttacttttgccaacagggtaatacgcttccgtacacgttcggaggcggcaccaagctggagatcacaggtggcggtggctcgggcggtggtgggtcgggtggcggcggatctgaggtgaaactgcaggagtcaggacctggcctggtggcgccctcacagagcctgtccgtcacatgcactgtctcaggggtctcattacccgactatggtgtaagctggattcgccagcctccacgaaagggtctggagtggctgggagtaatatggggtagtgaaaccacatactataattcagctctcaaatccagactgaccatcatcaaggacaactccaagagccaagttttcttaaaaatgaacagtctgcaaactgatgacacagccatttactactgtgccaaacattattactacggtggtagctatgctatggactactggggccaaggaacctcagtcaccgtctcctcagggaagcctatcccgaaccctctgttgggtctcgatagtaccaatggggccgcaaccacgacgccagcgccgcgaccaccaacaccggcgcccaccatcgcgttgcagcccctgtccctgcgcccagaggcgtgccggccagcggcggggggcgcagtgcacacgagggggctggacttcgcctgtgatttttgggtgctggtggtggttggtggagtcctggcttgctatagcttgctagtaacagtggcctttattattttctgggtgaggagtaagaggagcaggctcctgcacagtgactacatgaacatgactccccgccgccccgggcccacccgcaagcattaccagccctatgccccaccacgcgacttcgcagcctatcgctccaaacggggcagaaagaaactcctgtatatattcaaacaaccatttatgagaccagtacaaactactcaagaggaagatggctgtagctgccgatttccagaagaagaagaaggaggatgtgaactgggctcaggaagcgatatcgagaagctttgcaaaaaagctgaagaagaggcaaaggaggcgcaagagaaagctgatgagttgcggcaacggcaccccgacagccaggctgctgaggatgctgaggacttggcaaatctggcggtggccgctgtcttgacggcttgcttgttggcccaagaacatccaaacgctgacattgcaaagctttgcattaaggccgcgtccgaagcggctgaagcagcttctaaggcagccgagctggcgcaacggcatcctgactcccaagcggcgagggacgctataaaactcgcatcacaagcagccagagctgtaatcctcgctattatgctcgcagccgaaaacccaaacgctgatattgccaaactgtgtataaaggcggctagtgaagccgcagaagctgcaagcaaagcagcagaacttgcccaacgccaccccgactcccaggcggctagagatgctataaaacttgcttctcaggctgcggaggcggtagaacgagcgatctggctggcagcagagaaccccaacgctgacattgccaaaaagtgtatcaaggcggcttccgaagccgccgaggaggccagcaaagcggcggaagaggcacagagacatccggactcacagaaagcacgcgacgagattaaagaggctagtcaaaaagcagaggaggtaaaagaacgctgtaagtccggcagtggagagggcagaggaagtctgctaacatgcggtgacgtcgaggagaatcctggcccaatgattcatcttggtcacatcctcttcttgctgctgttgccagttgctgccgcacaaacaaccccaggtgagaggtcaagtcttcccgccttctatccgggcacaagcgggagttgtagtgggtgtggatctttgtcccttcctatatacatctgggctcctctggctggcacttgcggagtgcttctgctgagtctggttattaccaaacggggcagaaagaaactcctgtatatattcaaacaaccatttatgagaccagtacaaactactcaagaggaagatggctgtagctgccgatttccagaagaagaagaaggaggatgtgaactgggctgcgtggtcatagtgggcaggatcgtcttgtccggatccggcactagtgcgcccatcacggcgtacgcccagcagacgagaggcctcctagggtgtataatcaccagcctgactggccgggacaaaaaccaagtggagggtgaggtccagatcgtgtcaactgctacccaaaccttcctggcaacgtgcatcaatggggtatgctgggcagtctaccacggggccggaacgaggaccatcgcatcacccaagggtcctgtcatccagatgtataccaatgtggaccaagaccttgtgggctggcccgctcctcaaggttcccgctcattgacaccctgtacctgcggctcctcggacctttacctggtcacgaggcacgccgatgtcattcccgtgcgccggcgaggtgatagcaggggtagcctgctttcgccccggcccatttcctacttgaaaggctccgcggggggtccgctgttgtgccccgcgggacacgccgtgggcctattcagggccgcggtgtgcacccgtggagtggctaaagcggtggactttatccctgtggagaacctagagacaaccatgagatccccggtgttcacggacaactcctctagagtgaagttcagcaggagcgcagacgcccccgcgtacaagcagggccagaaccagctctataacgagctcaatctaggacgaagagaggagtacgatgttttggacaagagacgtggccgggaccctgagatggggggaaagccgagaaggaagaaccctcaggaaggcctgtacaatgaactgcagaaagataagatggcggaggcctacagtgagattgggatgaaaggcgagcgccggaggggcaaggggcacgatggcctttaccagggtctcagtacagccaccaaggacacctacgacgcccttcacatgcaggccctgccccctcgcggcatggtgagcaagggcgaggaggataacatggccatcatcaaggagttcatgcgcttcaaggtgcacatggagggctccgtgaacggccacgagttcgagatcgagggcgagggcgagggccgcccctacgagggcacccagaccgccaagctgaaggtgaccaagggtggccccctgcccttcgcctgggacatcctgtcccctcagttcatgtacggctccaaggcctacgtgaagcaccccgccgacatccccgactacttgaagctgtccttccccgagggcttcaagtgggagcgcgtgatgaacttcgaggacggcggcgtggtgaccgtgacccaggactcctccctgcaggacggcgagttcatctacaaggtgaagctgcgcggcaccaacttcccctccgacggccccgtaatgcagaagaagaccatgggctgggaggcctcctccgagcggatgtaccccgaggacggcgccctgaagggcgagatcaagcagaggctgaagctgaaggacggcggccactacgacgctgaggtcaagaccacctacaaggccaagaagcccgtgcagctgcccggcgcctacaacgtcaacatcaagttggacatcacctcccacaacgaggactacaccatcgtggaacagtacgaacgcgccgagggccgccactccaccggcggcatggacgagctgtacaagtaa

SEQ ID NO: 70 - DNA, 726 bp, Artificial Sequence
  synthetic polynucleotide
gacatccagatgacacagactacatcctccctgtctgcctctctgggagacagagtcaccatcagttgcagggcaagtcaggacattagtaaatatttaaattggtatcagcagaaaccagatggaactgttaaactcctgatctaccatacatcaagattacactcaggagtcccatcaaggttcagtggcagtgggtctggaacagattattctctcaccattagcaacctggagcaagaagatattgccacttacttttgccaacagggtaatacgcttccgtacacgttcggaggcggcaccaagctggagatcacaggtggcggtggctcgggcggtggtgggtcgggtggcggcggatctgaggtgaaactgcaggagtcaggacctggcctggtggcgccctcacagagcctgtccgtcacatgcactgtctcaggggtctcattacccgactatggtgtaagctggattcgccagcctccacgaaagggtctggagtggctgggagtaatatggggtagtgaaaccacatactataattcagctctcaaatccagactgaccatcatcaaggacaactccaagagccaagttttcttaaaaatgaacagtctgcaaactgatgacacagccatttactactgtgccaaacattattactacggtggtagctatgctatggactactggggccaaggaacctcagtcaccgtctcctca

SEQ ID NO: 71 - DNA, 99 bp, Artificial Sequence
  synthetic polynucleotide
ggagaacttgatgaattggtatacttactagatgggccaggttatgaccctatacattgcgatgtagtgacaaggggcggcagccaccttttcaatttt

SEQ ID NO: 72 - DNA, 144 bp, Artificial Sequence
  synthetic polynucleotide
atgattcatcttggtcacatcctcttcttgctgctgttgccagttgctgccgcacaaacaaccccaggtgagaggtcaagtcttcccgccttctatccgggcacaagcgggagttgtagtgggtgtggatctttgtcccttcct

SEQ ID NO: 73 - DNA, 63 bp, Artificial Sequence
  synthetic polynucleotide
atatacatctgggctcctctggctggcacttgcggagtgcttctgctgagtctggttattacc

SEQ ID NO: 74 - DNA, 36 bp, Artificial Sequence
  synthetic polynucleotide
ggttctgttgttattgttggtagaattattttatct

SEQ ID NO: 75 - DNA, 537 bp, Artificial Sequence
  synthetic polynucleotide
atcacggcctactcccaacagacgcggggcctacttggttgcatcatcactagcctcacaggccgggacaagaaccaggtcgaaggggaggttcaagtggtttctaccgcaacacaatctttcctggcgacctgcgtcaacggcgtgtgctggactgtctaccatggcgctggctcgaagaccctagccggtccaaaaggtccaatcacccaaatgtacaccaatgtagaccaggacctcgtcggctggcaggcgcctccaggggcgcgctccttgacaccatgcacctgtggcagctcggacctttacttggtcacgagacatgctgatgtcattccggtgcgccggcgaggcgacagcaggggaagtctactctcccccaggcccgtctcctacctgaaaggctccgcaggtggtccattgctttgcccttcggggcacgctgtgggcatcttccgggctgctgtgtgcacccggggggtcgcgaaggcggtggacttcgtgcccgttgagtctatggaaactaccatgcggtct

SEQ ID NO: 76 - DNA, 711 bp, Artificial Sequence
  synthetic polynucleotide
atggtgagcaagggcgaggaggataacatggccatcatcaaggagttcatgcgcttcaaggtgcacatggagggctccgtgaacggccacgagttcgagatcgagggcgagggcgagggccgcccctacgagggcacccagaccgccaagctgaaggtgaccaagggtggccccctgcccttcgcctgggacatcctgtcccctcagttcatgtacggctccaaggcctacgtgaagcaccccgccgacatccccgactacttgaagctgtccttccccgagggcttcaagtgggagcgcgtgatgaacttcgaggacggcggcgtggtgaccgtgacccaggactcctccctgcaggacggcgagttcatctacaaggtgaagctgcgcggcaccaacttcccctccgacggccccgtaatgcagaagaagaccatgggctgggaggcctcctccgagcggatgtaccccgaggacggcgccctgaagggcgagatcaagcagaggctgaagctgaaggacggcggccactacgacgctgaggtcaagaccacctacaaggccaagaagcccgtgcagctgcccggcgcctacaacgtcaacatcaagttggacatcacctcccacaacgaggactacaccatcgtggaacagtacgaacgcgccgagggccgccactccaccggcggcatggacgagctgtacaagtaa

SEQ ID NO: 77 - DNA, 687 bp, Artificial Sequence
  synthetic polynucleotide
tcttccgacgaagaagaagcgcgcgagctgatcgagcgtgcgaaggaggctgcggaacgcgcgcaagaagctgctgagcgtaccggtgatccgcgcgtgcgtgaactcgctcgtgagctgaaacgcctggctcaggaagctgctgaagaagtgaagcgtgacccgtcttcctccgatgtgaacgaagcgctcaaactcatcgtggaagctatcgaggcggctgtggacgcgctcgaagcggctgaacgcaccggcgacccggaggttcgtgagctggcgcgtgagctcgtgcgcctcgcggttgaggctgcggaggaggtgcaacgtaacccatcctcctctgacgtgaatgaggctctccacagcatagtttacgctattgaagctgccatttttgcattggaagctgccgaaaggactggtgacccggaagtgagagaactcgcccgagagcttgtaagactggcggttgaggcggctgaagaagtccagcgaaatccgtccagccggaatgtcgagcacgcactgatgaggattgtgttggccatttacctggcagaagaaaatctccgcgaagctgaggagtctggcgatccggaaaaacgtgaaaaggctcgcgaacgtgttcgtgaggcggtggaacgtgcggaagaggttcagcgtgatccatccggttggctgaatcat

SEQ ID NO: 78 - DNA, 63 bp, Artificial Sequence
  synthetic polynucleotide
ggcagtggagagggcagaggaagtctgctaacatgcggtgacgtcgaggagaatcctggccca

SEQ ID NO: 79 - DNA, 567 bp, Artificial Sequence
  synthetic polynucleotide
gcgcccatcacggcgtacgcccagcagacgagaggcctcctagggtgtataatcaccagcctgactggccgggacaaaaaccaagtggagggtgaggtccagatcgtgtcaactgctacccaaaccttcctggcaacgtgcatcaatggggtatgctgggcagtctaccacggggccggaacgaggaccatcgcatcacccaagggtcctgtcatccagatgtataccaatgtggaccaagaccttgtgggctggcccgctcctcaaggttcccgctcattgacaccctgtacctgcggctcctcggacctttacctggtcacgaggcacgccgatgtcattcccgtgcgccggcgaggtgatagcaggggtagcctgctttcgccccggcccatttcctacttgaaaggctccgcggggggtccgctgttgtgccccgcgggacacgccgtgggcctattcagggccgcggtgtgcacccgtggagtggctaaagcggtggactttatccctgtggagaacctagagacaaccatgagatccccggtgttcacggacaactcctct

SEQ ID NO: 80 - DNA, 12 bp, Artificial Sequence
  synthetic polynucleotide
ggctcaggaagc

SEQ ID NO: 81 - DNA, 699 bp, Artificial Sequence
  synthetic polynucleotide
gatatcgagaagctttgcaaaaaagctgaagaagaggcaaaggaggcgcaagagaaagctgatgagttgcggcaacggcaccccgacagccaggctgctgaggatgctgaggacttggcaaatctggcggtggccgctgtcttgacggcttgcttgttggcccaagaacatccaaacgctgacattgcaaagctttgcattaaggccgcgtccgaagcggctgaagcagcttctaaggcagccgagctggcgcaacggcatcctgactcccaagcggcgagggacgctataaaactcgcatcacaagcagccagagctgtaatcctcgctattatgctcgcagccgaaaacccaaacgctgatattgccaaactgtgtataaaggcggctagtgaagccgcagaagctgcaagcaaagcagcagaacttgcccaacgccaccccgactcccaggcggctagagatgctataaaacttgcttctcaggctgcggaggcggtagaacgagcgatctggctggcagcagagaaccccaacgctgacattgccaaaaagtgtatcaaggcggcttccgaagccgccgaggaggccagcaaagcggcggaagaggcacagagacatccggactcacagaaagcacgcgacgagattaaagaggctagtcaaaaagcagaggaggtaaaagaacgctgtaagtcc

SEQ ID NO: 82 - DNA, 51 bp, Artificial Sequence
  synthetic oligonucleotide
cctgacccgctgaattcggtacccccggagcgataggctgcgaagtcgcgt

SEQ ID NO: 83 - DNA, 27 bp, Artificial Sequence
  synthetic oligonucleotide
gggggtaccgaattcagcgggtcaggc

SEQ ID NO: 84 - protein, 441 aa, Artificial Sequence
  synthetic polypeptide
ALPVTALLLPLALLLHAARPDIQMTQTTSSLSASLGDRVTISCRASQDISKYLNWYQQKPDGTVKLLIYHTSRLHSGVPSRFSGSGSGTDYSLTISNLEQEDIATYFCQQGNTLPYTFGGGTKLEITGGGGSGGGGSGGGGSEVKLQESGPGLVAPSQSLSVTCTVSGVSLPDYGVSWIRQPPRKGLEWLGVIWGSETTYYNSALKSRLTIIKDNSKSQVFLKMNSLQTDDTAIYYCAKHYYYGGSYAMDYWGQGTSVTVSSGKPIPNPLLGLDSTNGAATTTPAPRPPTPAPTIALQPLSLRPEACRPAAGGAVHTRGLDFACDFWVLVVVGGVLACYSLLVTVAFIIFWVRSKRSRLLHSDYMNMTPRRPGPTRKHYQPYAPPRDFAAYRSGGTEFSGSGGSGSGGGELDELVYLLDGPGYDPIHCDVVTRGGSHLFNF

SEQ ID NO: 85 - protein, 483 aa, Artificial Sequence
  synthetic polypeptide
ALPVTALLLPLALLLHAARPDIQMTQTTSSLSASLGDRVTISCRASQDISKYLNWYQQKPDGTVKLLIYHTSRLHSGVPSRFSGSGSGTDYSLTISNLEQEDIATYFCQQGNTLPYTFGGGTKLEITGGGGSGGGGSGGGGSEVKLQESGPGLVAPSQSLSVTCTVSGVSLPDYGVSWIRQPPRKGLEWLGVIWGSETTYYNSALKSRLTIIKDNSKSQVFLKMNSLQTDDTAIYYCAKHYYYGGSYAMDYWGQGTSVTVSSGKPIPNPLLGLDSTNGAATTTPAPRPPTPAPTIALQPLSLRPEACRPAAGGAVHTRGLDFACDFWVLVVVGGVLACYSLLVTVAFIIFWVRSKRSRLLHSDYMNMTPRRPGPTRKHYQPYAPPRDFAAYRSKRGRKKLLYIFKQPFMRPVQTTQEEDGCSCRFPEEEEGGCELGGTEFSGSGGSGSGGGELDELVYLLDGPGYDPIHCDVVTRGGSHLFNF

SEQ ID NO: 86 - protein, 654 aa, Artificial Sequence
  synthetic polypeptide
IHLGHILFLLLLPVAAAQTTPGERSSLPAFYPGTSGSCSGCGSLSLPIYIWAPLAGTCGVLLLSLVITKRGRKKLLYIFKQPFMRPVQTTQEEDGCSCRFPEEEEGGCELGSVVIVGRIILSGSGSITAYSQQTRGLLGCIITSLTGRDKNQVEGEVQVVSTATQSFLATCVNGVCWTVYHGAGSKTLAGPKGPITQMYTNVDQDLVGWQAPPGARSLTPCTCGSSDLYLVTRHADVIPVRRRGDSRGSLLSPRPVSYLKGSAGGPLLCPSGHAVGIFRAAVCTRGVAKAVDFVPVESMETTMRSRVKFSRSADAPAYKQGQNQLYNELNLGRREEYDVLDKRRGRDPEMGGKPRRKNPQEGLYNELQKDKMAEAYSEIGMKGERRRGKGHDGLYQGLSTATKDTYDALHMQALPPRGMVSKGEEDNMAIIKEFMRFKVHMEGSVNGHEFEIEGEGEGRPYEGTQTAKLKVTKGGPLPFAWDILSPQFMYGSKAYVKHPADIPDYLKLSFPEGFKWERVMNFEDGGVVTVTQDSSLQDGEFIYKVKLRGTNFPSDGPVMQKKTMGWEASSERMYPEDGALKGEIKQRLKLKDGGHYDAEVKTTYKAKKPVQLPGAYNVNIKLDITSHNEDYTIVEQYERAEGRHSTGGMDELYK

SEQ ID NO: 87 - protein, 654 aa, Artificial Sequence
  synthetic polypeptide
IHLGHILFLLLLPVAAAQTTPGERSSLPAFYPGTSGSCSGCGSLSLPIYIWAPLAGTCGVLLLSLVITKRGRKKLLYIFKQPFMRPVQTTQEEDGCSCRFPEEEEGGCELRVKFSRSADAPAYKQGQNQLYNELNLGRREEYDVLDKRRGRDPEMGGKPRRKNPQEGLYNELQKDKMAEAYSEIGMKGERRRGKGHDGLYQGLSTATKDTYDALHMQALPPRGSVVIVGRIILSGSGSITAYSQQTRGLLGCIITSLTGRDKNQVEGEVQVVSTATQSFLATCVNGVCWTVYHGAGSKTLAGPKGPITQMYTNVDQDLVGWQAPPGARSLTPCTCGSSDLYLVTRHADVIPVRRRGDSRGSLLSPRPVSYLKGSAGGPLLCPSGHAVGIFRAAVCTRGVAKAVDFVPVESMETTMRSGMVSKGEEDNMAIIKEFMRFKVHMEGSVNGHEFEIEGEGEGRPYEGTQTAKLKVTKGGPLPFAWDILSPQFMYGSKAYVKHPADIPDYLKLSFPEGFKWERVMNFEDGGVVTVTQDSSLQDGEFIYKVKLRGTNFPSDGPVMQKKTMGWEASSERMYPEDGALKGEIKQRLKLKDGGHYDAEVKTTYKAKKPVQLPGAYNVNIKLDITSHNEDYTIVEQYERAEGRHSTGGMDELYK

SEQ ID NO: 88 - protein, 612 aa, Artificial Sequence
  synthetic polypeptide
IHLGHILFLLLLPVAAAQTTPGERSSLPAFYPGTSGSCSGCGSLSLPIYIWAPLAGTCGVLLLSLVITGSVVIVGRIILSGSGSITAYSQQTRGLLGCIITSLTGRDKNQVEGEVQVVSTATQSFLATCVNGVCWTVYHGAGSKTLAGPKGPITQMYTNVDQDLVGWQAPPGARSLTPCTCGSSDLYLVTRHADVIPVRRRGDSRGSLLSPRPVSYLKGSAGGPLLCPSGHAVGIFRAAVCTRGVAKAVDFVPVESMETTMRSRVKFSRSADAPAYKQGQNQLYNELNLGRREEYDVLDKRRGRDPEMGGKPRRKNPQEGLYNELQKDKMAEAYSEIGMKGERRRGKGHDGLYQGLSTATKDTYDALHMQALPPRGMVSKGEEDNMAIIKEFMRFKVHMEGSVNGHEFEIEGEGEGRPYEGTQTAKLKVTKGGPLPFAWDILSPQFMYGSKAYVKHPADIPDYLKLSFPEGFKWERVMNFEDGGVVTVTQDSSLQDGEFIYKVKLRGTNFPSDGPVMQKKTMGWEASSERMYPEDGALKGEIKQRLKLKDGGHYDAEVKTTYKAKKPVQLPGAYNVNIKLDITSHNEDYTIVEQYERAEGRHSTGGMDELYK

SEQ ID NO: 89 - protein, 612 aa, Artificial Sequence
  synthetic polypeptide
IHLGHILFLLLLPVAAAQTTPGERSSLPAFYPGTSGSCSGCGSLSLPIYIWAPLAGTCGVLLLSLVITRVKFSRSADAPAYKQGQNQLYNELNLGRREEYDVLDKRRGRDPEMGGKPRRKNPQEGLYNELQKDKMAEAYSEIGMKGERRRGKGHDGLYQGLSTATKDTYDALHMQALPPRGSVVIVGRIILSGSGSITAYSQQTRGLLGCIITSLTGRDKNQVEGEVQVVSTATQSFLATCVNGVCWTVYHGAGSKTLAGPKGPITQMYTNVDQDLVGWQAPPGARSLTPCTCGSSDLYLVTRHADVIPVRRRGDSRGSLLSPRPVSYLKGSAGGPLLCPSGHAVGIFRAAVCTRGVAKAVDFVPVESMETTMRSGMVSKGEEDNMAIIKEFMRFKVHMEGSVNGHEFEIEGEGEGRPYEGTQTAKLKVTKGGPLPFAWDILSPQFMYGSKAYVKHPADIPDYLKLSFPEGFKWERVMNFEDGGVVTVTQDSSLQDGEFIYKVKLRGTNFPSDGPVMQKKTMGWEASSERMYPEDGALKGEIKQRLKLKDGGHYDAEVKTTYKAKKPVQLPGAYNVNIKLDITSHNEDYTIVEQYERAEGRHSTGGMDELYK

SEQ ID NO: 90 - protein, 1313 aa, Artificial Sequence
  synthetic polypeptide
ALPVTALLLPLALLLHAARPDIQMTQTTSSLSASLGDRVTISCRASQDISKYLNWYQQKPDGTVKLLIYHTSRLHSGVPSRFSGSGSGTDYSLTISNLEQEDIATYFCQQGNTLPYTFGGGTKLEITGGGGSGGGGSGGGGSEVKLQESGPGLVAPSQSLSVTCTVSGVSLPDYGVSWIRQPPRKGLEWLGVIWGSETTYYNSALKSRLTIIKDNSKSQVFLKMNSLQTDDTAIYYCAKHYYYGGSYAMDYWGQGTSVTVSSGKPIPNPLLGLDSTNGAATTTPAPRPPTPAPTIALQPLSLRPEACRPAAGGAVHTRGLDFACDFWVLVVVGGVLACYSLLVTVAFIIFWVRSKRSRLLHSDYMNMTPRRPGPTRKHYQPYAPPRDFAAYRSGSGSSSDEEEARELIERAKEAAERAQEAAERTGDPRVRELARELKRLAQEAAEEVKRDPSSSDVNEALKLIVEAIEAAVDALEAAERTGDPEVRELARELVRLAVEAAEEVQRNPSSSDVNEALHSIVYAIEAAIFALEAAERTGDPEVRELARELVRLAVEAAEEVQRNPSSRNVEHALMRIVLAIYLAEENLREAEESGDPEKREKARERVREAVERAEEVQRDPSGWLNHGSGEGRGSLLTCGDVEENPGPMIHLGHILFLLLLPVAAAQTTPGERSSLPAFYPGTSGSCSGCGSLSLPIYIWAPLAGTCGVLLLSLVITKRGRKKLLYIFKQPFMRPVQTTQEEDGCSCRFPEEEEGGCELGCVVIVGRIVLSGSGTSAPITAYAQQTRGLLGCIITSLTGRDKNQVEGEVQIVSTATQTFLATCINGVCWAVYHGAGTRTIASPKGPVIQMYTNVDQDLVGWPAPQGSRSLTPCTCGSSDLYLVTRHADVIPVRRRGDSRGSLLSPRPISYLKGSAGGPLLCPAGHAVGLFRAAVCTRGVAKAVDFIPVENLETTMRSPVFTDNSSRVKFSRSADAPAYKQGQNQLYNELNLGRREEYDVLDKRRGRDPEMGGKPRRKNPQEGLYNELQKDKMAEAYSEIGMKGERRRGKGHDGLYQGLSTATKDTYDALHMQALPPRGMVSKGEEDNMAIIKEFMRFKVHMEGSVNGHEFEIEGEGEGRPYEGTQTAKLKVTKGGPLPFAWDILSPQFMYGSKAYVKHPADIPDYLKLSFPEGFKWERVMNFEDGGVVTVTQDSSLQDGEFIYKVKLRGTNFPSDGPVMQKKTMGWEASSERMYPEDGALKGEIKQRLKLKDGGHYDAEVKTTYKAKKPVQLPGAYNVNIKLDITSHNEDYTIVEQYERAEGRHSTGGMDELYK

SEQ ID NO: 91 - protein, 1355 aa, Artificial Sequence
  synthetic polypeptide
ALPVTALLLPLALLLHAARPDIQMTQTTSSLSASLGDRVTISCRASQDISKYLNWYQQKPDGTVKLLIYHTSRLHSGVPSRFSGSGSGTDYSLTISNLEQEDIATYFCQQGNTLPYTFGGGTKLEITGGGGSGGGGSGGGGSEVKLQESGPGLVAPSQSLSVTCTVSGVSLPDYGVSWIRQPPRKGLEWLGVIWGSETTYYNSALKSRLTIIKDNSKSQVFLKMNSLQTDDTAIYYCAKHYYYGGSYAMDYWGQGTSVTVSSGKPIPNPLLGLDSTNGAATTTPAPRPPTPAPTIALQPLSLRPEACRPAAGGAVHTRGLDFACDFWVLVVVGGVLACYSLLVTVAFIIFWVRSKRSRLLHSDYMNMTPRRPGPTRKHYQPYAPPRDFAAYRSKRGRKKLLYIFKQPFMRPVQTTQEEDGCSCRFPEEEEGGCELGSGSSSDEEEARELIERAKEAAERAQEAAERTGDPRVRELARELKRLAQEAAEEVKRDPSSSDVNEALKLIVEAIEAAVDALEAAERTGDPEVRELARELVRLAVEAAEEVQRNPSSSDVNEALHSIVYAIEAAIFALEAAERTGDPEVRELARELVRLAVEAAEEVQRNPSSRNVEHALMRIVLAIYLAEENLREAEESGDPEKREKARERVREAVERAEEVQRDPSGWLNHGSGEGRGSLLTCGDVEENPGPMIHLGHILFLLLLPVAAAQTTPGERSSLPAFYPGTSGSCSGCGSLSLPIYIWAPLAGTCGVLLLSLVITKRGRKKLLYIFKQPFMRPVQTTQEEDGCSCRFPEEEEGGCELGCVVIVGRIVLSGSGTSAPITAYAQQTRGLLGCIITSLTGRDKNQVEGEVQIVSTATQTFLATCINGVCWAVYHGAGTRTIASPKGPVIQMYTNVDQDLVGWPAPQGSRSLTPCTCGSSDLYLVTRHADVIPVRRRGDSRGSLLSPRPISYLKGSAGGPLLCPAGHAVGLFRAAVCTRGVAKAVDFIPVENLETTMRSPVFTDNSSRVKFSRSADAPAYKQGQNQLYNELNLGRREEYDVLDKRRGRDPEMGGKPRRKNPQEGLYNELQKDKMAEAYSEIGMKGERRRGKGHDGLYQGLSTATKDTYDALHMQALPPRGMVSKGEEDNMAIIKEFMRFKVHMEGSVNGHEFEIEGEGEGRPYEGTQTAKLKVTKGGPLPFAWDILSPQFMYGSKAYVKHPADIPDYLKLSFPEGFKWERVMNFEDGGVVTVTQDSSLQDGEFIYKVKLRGTNFPSDGPVMQKKTMGWEASSERMYPEDGALKGEIKQRLKLKDGGHYDAEVKTTYKAKKPVQLPGAYNVNIKLDITSHNEDYTIVEQYERAEGRHSTGGMDELYK

SEQ ID NO: 92 - protein, 1317 aa, Artificial Sequence
  synthetic polypeptide
ALPVTALLLPLALLLHAARPDIQMTQTTSSLSASLGDRVTISCRASQDISKYLNWYQQKPDGTVKLLIYHTSRLHSGVPSRFSGSGSGTDYSLTISNLEQEDIATYFCQQGNTLPYTFGGGTKLEITGGGGSGGGGSGGGGSEVKLQESGPGLVAPSQSLSVTCTVSGVSLPDYGVSWIRQPPRKGLEWLGVIWGSETTYYNSALKSRLTIIKDNSKSQVFLKMNSLQTDDTAIYYCAKHYYYGGSYAMDYWGQGTSVTVSSGKPIPNPLLGLDSTNGAATTTPAPRPPTPAPTIALQPLSLRPEACRPAAGGAVHTRGLDFACDFWVLVVVGGVLACYSLLVTVAFIIFWVRSKRSRLLHSDYMNMTPRRPGPTRKHYQPYAPPRDFAAYRSGSGSDIEKLCKKAEEEAKEAQEKADELRQRHPDSQAAEDAEDLANLAVAAVLTACLLAQEHPNADIAKLCIKAASEAAEAASKAAELAQRHPDSQAARDAIKLASQAARAVILAIMLAAENPNADIAKLCIKAASEAAEAASKAAELAQRHPDSQAARDAIKLASQAAEAVERAIWLAAENPNADIAKKCIKAASEAAEEASKAAEEAQRHPDSQKARDEIKEASQKAEEVKERCKSGSGEGRGSLLTCGDVEENPGPMIHLGHILFLLLLPVAAAQTTPGERSSLPAFYPGTSGSCSGCGSLSLPIYIWAPLAGTCGVLLLSLVITKRGRKKLLYIFKQPFMRPVQTTQEEDGCSCRFPEEEEGGCELGCVVIVGRIVLSGSGTSAPITAYAQQTRGLLGCIITSLTGRDKNQVEGEVQIVSTATQTFLATCINGVCWAVYHGAGTRTIASPKGPVIQMYTNVDQDLVGWPAPQGSRSLTPCTCGSSDLYLVTRHADVIPVRRRGDSRGSLLSPRPISYLKGSAGGPLLCPAGHAVGLFRAAVCTRGVAKAVDFIPVENLETTMRSPVFTDNSSRVKFSRSADAPAYKQGQNQLYNELNLGRREEYDVLDKRRGRDPEMGGKPRRKNPQEGLYNELQKDKMAEAYSEIGMKGERRRGKGHDGLYQGLSTATKDTYDALHMQALPPRGMVSKGEEDNMAIIKEFMRFKVHMEGSVNGHEFEIEGEGEGRPYEGTQTAKLKVTKGGPLPFAWDILSPQFMYGSKAYVKHPADIPDYLKLSFPEGFKWERVMNFEDGGVVTVTQDSSLQDGEFIYKVKLRGTNFPSDGPVMQKKTMGWEASSERMYPEDGALKGEIKQRLKLKDGGHYDAEVKTTYKAKKPVQLPGAYNVNIKLDITSHNEDYTIVEQYERAEGRHSTGGMDELYK

SEQ ID NO: 93 - protein, 1359 aa, Artificial Sequence
  synthetic polypeptide
ALPVTALLLPLALLLHAARPDIQMTQTTSSLSASLGDRVTISCRASQDISKYLNWYQQKPDGTVKLLIYHTSRLHSGVPSRFSGSGSGTDYSLTISNLEQEDIATYFCQQGNTLPYTFGGGTKLEITGGGGSGGGGSGGGGSEVKLQESGPGLVAPSQSLSVTCTVSGVSLPDYGVSWIRQPPRKGLEWLGVIWGSETTYYNSALKSRLTIIKDNSKSQVFLKMNSLQTDDTAIYYCAKHYYYGGSYAMDYWGQGTSVTVSSGKPIPNPLLGLDSTNGAATTTPAPRPPTPAPTIALQPLSLRPEACRPAAGGAVHTRGLDFACDFWVLVVVGGVLACYSLLVTVAFIIFWVRSKRSRLLHSDYMNMTPRRPGPTRKHYQPYAPPRDFAAYRSKRGRKKLLYIFKQPFMRPVQTTQEEDGCSCRFPEEEEGGCELGSGSDIEKLCKKAEEEAKEAQEKADELRQRHPDSQAAEDAEDLANLAVAAVLTACLLAQEHPNADIAKLCIKAASEAAEAASKAAELAQRHPDSQAARDAIKLASQAARAVILAIMLAAENPNADIAKLCIKAASEAAEAASKAAELAQRHPDSQAARDAIKLASQAAEAVERAIWLAAENPNADIAKKCIKAASEAAEEASKAAEEAQRHPDSQKARDEIKEASQKAEEVKERCKSGSGEGRGSLLTCGDVEENPGPMIHLGHILFLLLLPVAAAQTTPGERSSLPAFYPGTSGSCSGCGSLSLPIYIWAPLAGTCGVLLLSLVITKRGRKKLLYIFKQPFMRPVQTTQEEDGCSCRFPEEEEGGCELGCVVIVGRIVLSGSGTSAPITAYAQQTRGLLGCIITSLTGRDKNQVEGEVQIVSTATQTFLATCINGVCWAVYHGAGTRTIASPKGPVIQMYTNVDQDLVGWPAPQGSRSLTPCTCGSSDLYLVTRHADVIPVRRRGDSRGSLLSPRPISYLKGSAGGPLLCPAGHAVGLFRAAVCTRGVAKAVDFIPVENLETTMRSPVFTDNSSRVKFSRSADAPAYKQGQNQLYNELNLGRREEYDVLDKRRGRDPEMGGKPRRKNPQEGLYNELQKDKMAEAYSEIGMKGERRRGKGHDGLYQGLSTATKDTYDALHMQALPPRGMVSKGEEDNMAIIKEFMRFKVHMEGSVNGHEFEIEGEGEGRPYEGTQTAKLKVTKGGPLPFAWDILSPQFMYGSKAYVKHPADIPDYLKLSFPEGFKWERVMNFEDGGVVTVTQDSSLQDGEFIYKVKLRGTNFPSDGPVMQKKTMGWEASSERMYPEDGALKGEIKQRLKLKDGGHYDAEVKTTYKAKKPVQLPGAYNVNIKLDITSHNEDYTIVEQYERAEGRHSTGGMDELYK

SEQ ID NO: 94 - protein, 242 aa, Artificial Sequence
  synthetic polypeptide
DIQMTQTTSSLSASLGDRVTISCRASQDISKYLNWYQQKPDGTVKLLIYHTSRLHSGVPSRFSGSGSGTDYSLTISNLEQEDIATYFCQQGNTLPYTFGGGTKLEITGGGGSGGGGSGGGGSEVKLQESGPGLVAPSQSLSVTCTVSGVSLPDYGVSWIRQPPRKGLEWLGVIWGSETTYYNSALKSRLTIIKDNSKSQVFLKMNSLQTDDTAIYYCAKHYYYGGSYAMDYWGQGTSVTVSS

SEQ ID NO: 95 - protein, 33 aa, Artificial Sequence
  synthetic polypeptide
GELDELVYLLDGPGYDPIHCDVVTRGGSHLFNF

SEQ ID NO: 96 - protein, 47 aa, Artificial Sequence
  synthetic polypeptide
IHLGHILFLLLLPVAAAQTTPGERSSLPAFYPGTSGSCSGCGSLSLP

SEQ ID NO: 97 - protein, 21 aa, Artificial Sequence
  synthetic polypeptide
IYIWAPLAGTCGVLLLSLVIT

SEQ ID NO: 98 - protein, 12 aa, Artificial Sequence
  synthetic polypeptide
GSVVIVGRIILS

SEQ ID NO: 99 - protein, 179 aa, Artificial Sequence
  synthetic polypeptide
ITAYSQQTRGLLGCIITSLTGRDKNQVEGEVQVVSTATQSFLATCVNGVCWTVYHGAGSKTLAGPKGPITQMYTNVDQDLVGWQAPPGARSLTPCTCGSSDLYLVTRHADVIPVRRRGDSRGSLLSPRPVSYLKGSAGGPLLCPSGHAVGIFRAAVCTRGVAKAVDFVPVESMETTMRS

SEQ ID NO: 100 - protein, 236 aa, Artificial Sequence
  synthetic polypeptide
MVSKGEEDNMAIIKEFMRFKVHMEGSVNGHEFEIEGEGEGRPYEGTQTAKLKVTKGGPLPFAWDILSPQFMYGSKAYVKHPADIPDYLKLSFPEGFKWERVMNFEDGGVVTVTQDSSLQDGEFIYKVKLRGTNFPSDGPVMQKKTMGWEASSERMYPEDGALKGEIKQRLKLKDGGHYDAEVKTTYKAKKPVQLPGAYNVNIKLDITSHNEDYTIVEQYERAEGRHSTGGMDELYK

SEQ ID NO: 101 - protein, 229 aa, Artificial Sequence
  synthetic polypeptide
SSDEEEARELIERAKEAAERAQEAAERTGDPRVRELARELKRLAQEAAEEVKRDPSSSDVNEALKLIVEAIEAAVDALEAAERTGDPEVRELARELVRLAVEAAEEVQRNPSSSDVNEALHSIVYAIEAAIFALEAAERTGDPEVRELARELVRLAVEAAEEVQRNPSSRNVEHALMRIVLAIYLAEENLREAEESGDPEKREKARERVREAVERAEEVQRDPSGWLNH

SEQ ID NO: 102 - protein, 21 aa, Artificial Sequence
  synthetic polypeptide
GSGEGRGSLLTCGDVEENPGP

SEQ ID NO: 103 - protein, 189 aa, Artificial Sequence
  synthetic polypeptide
APITAYAQQTRGLLGCIITSLTGRDKNQVEGEVQIVSTATQTFLATCINGVCWAVYHGAGTRTIASPKGPVIQMYTNVDQDLVGWPAPQGSRSLTPCTCGSSDLYLVTRHADVIPVRRRGDSRGSLLSPRPISYLKGSAGGPLLCPAGHAVGLFRAAVCTRGVAKAVDFIPVENLETTMRSPVFTDNSS

SEQ ID NO: 104 - protein, 4 aa, Artificial Sequence
  synthetic polypeptide
GSGS

SEQ ID NO: 105 - protein, 233 aa, Artificial Sequence
  synthetic polypeptide
DIEKLCKKAEEEAKEAQEKADELRQRHPDSQAAEDAEDLANLAVAAVLTACLLAQEHPNADIAKLCIKAASEAAEAASKAAELAQRHPDSQAARDAIKLASQAARAVILAIMLAAENPNADIAKLCIKAASEAAEAASKAAELAQRHPDSQAARDAIKLASQAAEAVERAIWLAAENPNADIAKKCIKAASEAAEEASKAAEEAQRHPDSQKARDEIKEASQKAEEVKERCKS

SEQ ID NO: 106 - DNA, 3360 bp, Artificial Sequence
  synthetic polynucleotide
atggccttaccagtgaccgccttgctcctgccgctggccttgctgctccacgccgccaggccggacatccagatgacacagactacatcctccctgtctgcctctctgggagacagagtcaccatcagttgcagggcaagtcaggacattagtaaatatttaaattggtatcagcagaaaccagatggaactgttaaactcctgatctaccatacatcaagattacactcaggagtcccatcaaggttcagtggcagtgggtctggaacagattattctctcaccattagcaacctggagcaagaagatattgccacttacttttgccaacagggtaatacgcttccgtacacgttcggaggcggcaccaagctggagatcacaggtggcggtggctcgggcggtggtgggtcgggtggcggcggatctgaggtgaaactgcaggagtcaggacctggcctggtggcgccctcacagagcctgtccgtcacatgcactgtctcaggggtctcattacccgactatggtgtaagctggattcgccagcctccacgaaagggtctggagtggctgggagtaatatggggtagtgaaaccacatactataattcagctctcaaatccagactgaccatcatcaaggacaactccaagagccaagttttcttaaaaatgaacagtctgcaaactgatgacacagccatttactactgtgccaaacattattactacggtggtagctatgctatggactactggggccaaggaacctcagtcaccgtctcctcagggaagcctatcccgaaccctctgttgggtctcgatagtaccaatggggccgcaaccacgacgccagcgccgcgaccaccaacaccggcgcccaccatcgcgttgcagcccctgtccctgcgcccagaggcgtgccggccagcggcggggggcgcagtgcacacgagggggctggacttcgcctgtgatttttgggtgctggtggtggttggtggagtcctggcttgctatagcttgctagtaacagtggcctttattattttctgggtgaggagtaagaggagcaggctcctgcacagtgactacatgaacatgactccccgccgccccgggcccacccgcaagcattaccagccctatgccccaccacgcgacttcgcagcctatcgctccgggggtaccgaattcagcgggtcaggcggatctggaagtggtggtggagaacttgatgaattggtatacttactagatgggccaggttatgaccctatacattgcgatgtagtgacaaggggcggcagccaccttttcaattttggaagcggagctactaacttcagcctgctgaagcaggctggagacgtggaggagaaccctggacctatgattcatcttggtcacatcctcttcttgctgctgttgccagttgctgccgcacaaacaaccccaggtgagaggtcaagtcttcccgccttctatccgggcacaagcgggagttgtagtgggtgtggatctttgtcccttcctatatacatctgggctcctctggctggcacttgcggagtgcttctgctgagtctggttattaccaaacggggcagaaagaaactcctgtatatattcaaacaaccatttatgagaccagtacaaactactcaagaggaagatggctgtagctgccgatttccagaagaagaagaaggaggatgtgaactgggttctgttgttattgttggtagaattattttatctggtagtggtagtatcacggcctactcccaacagacgcggggcctacttggttgcatcatcactagcctcacaggccgggacaagaaccaggtcgaaggggaggttcaagtggtttctaccgcaacacaatctttcctggcgacctgcgtcaacggcgtgtgctggactgtctaccatggcgctggctcgaagaccctagccggtccaaaaggtccaatcacccaaatgtacaccaatgtagaccaggacctcgtcggctggcaggcgcctccaggggcgcgctccttgacaccatgcacctgtggcagctcggacctttacttggtcacgagacatgctgatgtcattccggtgcgccggcgaggcgacagcaggggaagtctactctcccccaggcccgtctcctacctgaaaggctccgcaggtggtccattgctttgcccttcggggcacgctgtgggcatcttccgggctgctgtgtgcacccggggggtcgcgaaggcggtggacttcgtgcccgttgagtctatggaaactaccatgcggtctagagtgaagttcagcaggagcgcagacgcccccgcgtacaagcagggccagaaccagctctataacgagctcaatctaggacgaagagaggagtacgatgttttggacaagagacgtggccgggaccctgagatggggggaaagccgagaaggaagaaccctcaggaaggcctgtacaatgaactgcagaaagataagatggcggaggcctacagtgagattgggatgaaaggcgagcgccggaggggcaaggggcacgatggcctttaccagggtctcagtacagccaccaaggacacctacgacgcccttcacatgcaggccctgccccctcgcggcatggtgagcaagggcgaggaggataacatggccatcatcaaggagttcatgcgcttcaaggtgcacatggagggctccgtgaacggccacgagttcgagatcgagggcgagggcgagggccgcccctacgagggcacccagaccgccaagctgaaggtgaccaagggtggccccctgcccttcgcctgggacatcctgtcccctcagttcatgtacggctccaaggcctacgtgaagcaccccgccgacatccccgactacttgaagctgtccttccccgagggcttcaagtgggagcgcgtgatgaacttcgaggacggcggcgtggtgaccgtgacccaggactcctccctgcaggacggcgagttcatctacaaggtgaagctgcgcggcaccaacttcccctccgacggccccgtaatgcagaagaagaccatgggctgggaggcctcctccgagcggatgtaccccgaggacggcgccctgaagggcgagatcaagcagaggctgaagctgaaggacggcggccactacgacgctgaggtcaagaccacctacaaggccaagaagcccgtgcagctgcccggcgcctacaacgtcaacatcaagttggacatcacctcccacaacgaggactacaccatcgtggaacagtacgaacgcgccgagggccgccactccaccggcggcatggacgagctgtacaagtaa

SEQ ID NO: 107 - DNA, 3360 bp, Artificial Sequence
  synthetic polynucleotide
atggccttaccagtgaccgccttgctcctgccgctggccttgctgctccacgccgccaggccggacatccagatgacacagactacatcctccctgtctgcctctctgggagacagagtcaccatcagttgcagggcaagtcaggacattagtaaatatttaaattggtatcagcagaaaccagatggaactgttaaactcctgatctaccatacatcaagattacactcaggagtcccatcaaggttcagtggcagtgggtctggaacagattattctctcaccattagcaacctggagcaagaagatattgccacttacttttgccaacagggtaatacgcttccgtacacgttcggaggcggcaccaagctggagatcacaggtggcggtggctcgggcggtggtgggtcgggtggcggcggatctgaggtgaaactgcaggagtcaggacctggcctggtggcgccctcacagagcctgtccgtcacatgcactgtctcaggggtctcattacccgactatggtgtaagctggattcgccagcctccacgaaagggtctggagtggctgggagtaatatggggtagtgaaaccacatactataattcagctctcaaatccagactgaccatcatcaaggacaactccaagagccaagttttcttaaaaatgaacagtctgcaaactgatgacacagccatttactactgtgccaaacattattactacggtggtagctatgctatggactactggggccaaggaacctcagtcaccgtctcctcagggaagcctatcccgaaccctctgttgggtctcgatagtaccaatggggccgcaaccacgacgccagcgccgcgaccaccaacaccggcgcccaccatcgcgttgcagcccctgtccctgcgcccagaggcgtgccggccagcggcggggggcgcagtgcacacgagggggctggacttcgcctgtgatttttgggtgctggtggtggttggtggagtcctggcttgctatagcttgctagtaacagtggcctttattattttctgggtgaggagtaagaggagcaggctcctgcacagtgactacatgaacatgactccccgccgccccgggcccacccgcaagcattaccagccctatgccccaccacgcgacttcgcagcctatcgctccgggggtaccgaattcagcgggtcaggcggatctggaagtggtggtggagaacttgatgaattggtatacttactagatgggccaggttatgaccctatacattgcgatgtagtgacaaggggcggcagccaccttttcaattttggaagcggagctactaacttcagcctgctgaagcaggctggagacgtggaggagaaccctggacctatgattcatcttggtcacatcctcttcttgctgctgttgccagttgctgccgcacaaacaaccccaggtgagaggtcaagtcttcccgccttctatccgggcacaagcgggagttgtagtgggtgtggatctttgtcccttcctatatacatctgggctcctctggctggcacttgcggagtgcttctgctgagtctggttattaccaaacggggcagaaagaaactcctgtatatattcaaacaaccatttatgagaccagtacaaactactcaagaggaagatggctgtagctgccgatttccagaagaagaagaaggaggatgtgaactgagagtgaagttcagcaggagcgcagacgcccccgcgtacaagcagggccagaaccagctctataacgagctcaatctaggacgaagagaggagtacgatgttttggacaagagacgtggccgggaccctgagatggggggaaagccgagaaggaagaaccctcaggaaggcctgtacaatgaactgcagaaagataagatggcggaggcctacagtgagattgggatgaaaggcgagcgccggaggggcaaggggcacgatggcctttaccagggtctcagtacagccaccaaggacacctacgacgcccttcacatgcaggccctgccccctcgcggttctgttgttattgttggtagaattattttatctggtagtggtagtatcacggcctactcccaacagacgcggggcctacttggttgcatcatcactagcctcacaggccgggacaagaaccaggtcgaaggggaggttcaagtggtttctaccgcaacacaatctttcctggcgacctgcgtcaacggcgtgtgctggactgtctaccatggcgctggctcgaagaccctagccggtccaaaaggtccaatcacccaaatgtacaccaatgtagaccaggacctcgtcggctggcaggcgcctccaggggcgcgctccttgacaccatgcacctgtggcagctcggacctttacttggtcacgagacatgctgatgtcattccggtgcgccggcgaggcgacagcaggggaagtctactctcccccaggcccgtctcctacctgaaaggctccgcaggtggtccattgctttgcccttcggggcacgctgtgggcatcttccgggctgctgtgtgcacccggggggtcgcgaaggcggtggacttcgtgcccgttgagtctatggaaactaccatgcggtctggcatggtgagcaagggcgaggaggataacatggccatcatcaaggagttcatgcgcttcaaggtgcacatggagggctccgtgaacggccacgagttcgagatcgagggcgagggcgagggccgcccctacgagggcacccagaccgccaagctgaaggtgaccaagggtggccccctgcccttcgcctgggacatcctgtcccctcagttcatgtacggctccaaggcctacgtgaagcaccccgccgacatccccgactacttgaagctgtccttccccgagggcttcaagtgggagcgcgtgatgaacttcgaggacggcggcgtggtgaccgtgacccaggactcctccctgcaggacggcgagttcatctacaaggtgaagctgcgcggcaccaacttcccctccgacggccccgtaatgcagaagaagaccatgggctgggaggcctcctccgagcggatgtaccccgaggacggcgccctgaagggcgagatcaagcagaggctgaagctgaaggacggcggccactacgacgctgaggtcaagaccacctacaaggccaagaagcccgtgcagctgcccggcgcctacaacgtcaacatcaagttggacatcacctcccacaacgaggactacaccatcgtggaacagtacgaacgcgccgagggccgccactccaccggcggcatggacgagctgtacaagtaa

SEQ ID NO: 108 - DNA, 3234 bp, Artificial Sequence
  synthetic polynucleotide
atggccttaccagtgaccgccttgctcctgccgctggccttgctgctccacgccgccaggccggacatccagatgacacagactacatcctccctgtctgcctctctgggagacagagtcaccatcagttgcagggcaagtcaggacattagtaaatatttaaattggtatcagcagaaaccagatggaactgttaaactcctgatctaccatacatcaagattacactcaggagtcccatcaaggttcagtggcagtgggtctggaacagattattctctcaccattagcaacctggagcaagaagatattgccacttacttttgccaacagggtaatacgcttccgtacacgttcggaggcggcaccaagctggagatcacaggtggcggtggctcgggcggtggtgggtcgggtggcggcggatctgaggtgaaactgcaggagtcaggacctggcctggtggcgccctcacagagcctgtccgtcacatgcactgtctcaggggtctcattacccgactatggtgtaagctggattcgccagcctccacgaaagggtctggagtggctgggagtaatatggggtagtgaaaccacatactataattcagctctcaaatccagactgaccatcatcaaggacaactccaagagccaagttttcttaaaaatgaacagtctgcaaactgatgacacagccatttactactgtgccaaacattattactacggtggtagctatgctatggactactggggccaaggaacctcagtcaccgtctcctcagggaagcctatcccgaaccctctgttgggtctcgatagtaccaatggggccgcaaccacgacgccagcgccgcgaccaccaacaccggcgcccaccatcgcgttgcagcccctgtccctgcgcccagaggcgtgccggccagcggcggggggcgcagtgcacacgagggggctggacttcgcctgtgatttttgggtgctggtggtggttggtggagtcctggcttgctatagcttgctagtaacagtggcctttattattttctgggtgaggagtaagaggagcaggctcctgcacagtgactacatgaacatgactccccgccgccccgggcccacccgcaagcattaccagccctatgccccaccacgcgacttcgcagcctatcgctccgggggtaccgaattcagcgggtcaggcggatctggaagtggtggtggagaacttgatgaattggtatacttactagatgggccaggttatgaccctatacattgcgatgtagtgacaaggggcggcagccaccttttcaattttggaagcggagctactaacttcagcctgctgaagcaggctggagacgtggaggagaaccctggacctatgattcatcttggtcacatcctcttcttgctgctgttgccagttgctgccgcacaaacaaccccaggtgagaggtcaagtcttcccgccttctatccgggcacaagcgggagttgtagtgggtgtggatctttgtcccttcctatatacatctgggctcctctggctggcacttgcggagtgcttctgctgagtctggttattaccggttctgttgttattgttggtagaattattttatctggtagtggtagtatcacggcctactcccaacagacgcggggcctacttggttgcatcatcactagcctcacaggccgggacaagaaccaggtcgaaggggaggttcaagtggtttctaccgcaacacaatctttcctggcgacctgcgtcaacggcgtgtgctggactgtctaccatggcgctggctcgaagaccctagccggtccaaaaggtccaatcacccaaatgtacaccaatgtagaccaggacctcgtcggctggcaggcgcctccaggggcgcgctccttgacaccatgcacctgtggcagctcggacctttacttggtcacgagacatgctgatgtcattccggtgcgccggcgaggcgacagcaggggaagtctactctcccccaggcccgtctcctacctgaaaggctccgcaggtggtccattgctttgcccttcggggcacgctgtgggcatcttccgggctgctgtgtgcacccggggggtcgcgaaggcggtggacttcgtgcccgttgagtctatggaaactaccatgcggtctagagtgaagttcagcaggagcgcagacgcccccgcgtacaagcagggccagaaccagctctataacgagctcaatctaggacgaagagaggagtacgatgttttggacaagagacgtggccgggaccctgagatggggggaaagccgagaaggaagaaccctcaggaaggcctgtacaatgaactgcagaaagataagatggcggaggcctacagtgagattgggatgaaaggcgagcgccggaggggcaaggggcacgatggcctttaccagggtctcagtacagccaccaaggacacctacgacgcccttcacatgcaggccctgccccctcgcggcatggtgagcaagggcgaggaggataacatggccatcatcaaggagttcatgcgcttcaaggtgcacatggagggctccgtgaacggccacgagttcgagatcgagggcgagggcgagggccgcccctacgagggcacccagaccgccaagctgaaggtgaccaagggtggccccctgcccttcgcctgggacatcctgtcccctcagttcatgtacggctccaaggcctacgtgaagcaccccgccgacatccccgactacttgaagctgtccttccccgagggcttcaagtgggagcgcgtgatgaacttcgaggacggcggcgtggtgaccgtgacccaggactcctccctgcaggacggcgagttcatctacaaggtgaagctgcgcggcaccaacttcccctccgacggccccgtaatgcagaagaagaccatgggctgggaggcctcctccgagcggatgtaccccgaggacggcgccctgaagggcgagatcaagcagaggctgaagctgaaggacggcggccactacgacgctgaggtcaagaccacctacaaggccaagaagcccgtgcagctgcccggcgcctacaacgtcaacatcaagttggacatcacctcccacaacgaggactacaccatcgtggaacagtacgaacgcgccgagggccgccactccaccggcggcatggacgagctgtacaagtaa

SEQ ID NO: 109 - DNA, 3234 bp, Artificial Sequence
  synthetic polynucleotide
atggccttaccagtgaccgccttgctcctgccgctggccttgctgctccacgccgccaggccggacatccagatgacacagactacatcctccctgtctgcctctctgggagacagagtcaccatcagttgcagggcaagtcaggacattagtaaatatttaaattggtatcagcagaaaccagatggaactgttaaactcctgatctaccatacatcaagattacactcaggagtcccatcaaggttcagtggcagtgggtctggaacagattattctctcaccattagcaacctggagcaagaagatattgccacttacttttgccaacagggtaatacgcttccgtacacgttcggaggcggcaccaagctggagatcacaggtggcggtggctcgggcggtggtgggtcgggtggcggcggatctgaggtgaaactgcaggagtcaggacctggcctggtggcgccctcacagagcctgtccgtcacatgcactgtctcaggggtctcattacccgactatggtgtaagctggattcgccagcctccacgaaagggtctggagtggctgggagtaatatggggtagtgaaaccacatactataattcagctctcaaatccagactgaccatcatcaaggacaactccaagagccaagttttcttaaaaatgaacagtctgcaaactgatgacacagccatttactactgtgccaaacattattactacggtggtagctatgctatggactactggggccaaggaacctcagtcaccgtctcctcagggaagcctatcccgaaccctctgttgggtctcgatagtaccaatggggccgcaaccacgacgccagcgccgcgaccaccaacaccggcgcccaccatcgcgttgcagcccctgtccctgcgcccagaggcgtgccggccagcggcggggggcgcagtgcacacgagggggctggacttcgcctgtgatttttgggtgctggtggtggttggtggagtcctggcttgctatagcttgctagtaacagtggcctttattattttctgggtgaggagtaagaggagcaggctcctgcacagtgactacatgaacatgactccccgccgccccgggcccacccgcaagcattaccagccctatgccccaccacgcgacttcgcagcctatcgctccgggggtaccgaattcagcgggtcaggcggatctggaagtggtggtggagaacttgatgaattggtatacttactagatgggccaggttatgaccctatacattgcgatgtagtgacaaggggcggcagccaccttttcaattttggaagcggagctactaacttcagcctgctgaagcaggctggagacgtggaggagaaccctggacctatgattcatcttggtcacatcctcttcttgctgctgttgccagttgctgccgcacaaacaaccccaggtgagaggtcaagtcttcccgccttctatccgggcacaagcgggagttgtagtgggtgtggatctttgtcccttcctatatacatctgggctcctctggctggcacttgcggagtgctcctgctgagtctggttattaccagagtgaagttcagcaggagcgcagacgcccccgcgtacaagcagggccagaaccagctctataacgagctcaatctaggacgaagagaggagtacgatgttttggacaagagacgtggccgggaccctgagatggggggaaagccgagaaggaagaaccctcaggaaggcctgtacaatgaactgcagaaagataagatggcggaggcctacagtgagattgggatgaaaggcgagcgccggaggggcaaggggcacgatggcctttaccagggtctcagtacagccaccaaggacacctacgacgcccttcacatgcaggccctgccccctcgcggttctgttgttattgttggtagaattattttatctggtagtggtagtatcacggcctactcccaacagacgcggggcctacttggttgcatcatcactagcctcacaggccgggacaagaaccaggtcgaaggggaggttcaagtggtttctaccgcaacacaatctttcctggcgacctgcgtcaacggcgtgtgctggactgtctaccatggcgctggctcgaagaccctagccggtccaaaaggtccaatcacccaaatgtacaccaatgtagaccaggacctcgtcggctggcaggcgcctccaggggcgcgctccttgacaccatgcacctgtggcagctcggacctttacttggtcacgagacatgctgatgtcattccggtgcgccggcgaggcgacagcaggggaagtctactctcccccaggcccgtctcctacctgaaaggctccgcaggtggtccattgctttgcccttcggggcacgctgtgggcatcttccgggctgctgtgtgcacccggggggtcgcgaaggcggtggacttcgtgcccgttgagtctatggaaactaccatgcggtctggcatggtgagcaagggcgaggaggataacatggccatcatcaaggagttcatgcgcttcaaggtgcacatggagggctccgtgaacggccacgagttcgagatcgagggcgagggcgagggccgcccctacgagggcacccagaccgccaagctgaaggtgaccaagggtggccccctgcccttcgcctgggacatcctgtcccctcagttcatgtacggctccaaggcctacgtgaagcaccccgccgacatccccgactacttgaagctgtccttccccgagggcttcaagtgggagcgcgtgatgaacttcgaggacggcggcgtggtgaccgtgacccaggactcctccctgcaggacggcgagttcatctacaaggtgaagctgcgcggcaccaacttcccctccgacggccccgtaatgcagaagaagaccatgggctgggaggcctcctccgagcggatgtaccccgaggacggcgccctgaagggcgagatcaagcagaggctgaagctgaaggacggcggccactacgacgctgaggtcaagaccacctacaaggccaagaagcccgtgcagctgcccggcgcctacaacgtcaacatcaagttggacatcacctcccacaacgaggactacaccatcgtggaacagtacgaacgcgccgagggccgccactccaccggcggcatggacgagctgtacaagtaa

SEQ ID NO: 110 - DNA, 3486 bp, Artificial Sequence
  synthetic polynucleotide
atggccttaccagtgaccgccttgctcctgccgctggccttgctgctccacgccgccaggccggacatccagatgacacagactacatcctccctgtctgcctctctgggagacagagtcaccatcagttgcagggcaagtcaggacattagtaaatatttaaattggtatcagcagaaaccagatggaactgttaaactcctgatctaccatacatcaagattacactcaggagtcccatcaaggttcagtggcagtgggtctggaacagattattctctcaccattagcaacctggagcaagaagatattgccacttacttttgccaacagggtaatacgcttccgtacacgttcggaggcggcaccaagctggagatcacaggtggcggtggctcgggcggtggtgggtcgggtggcggcggatctgaggtgaaactgcaggagtcaggacctggcctggtggcgccctcacagagcctgtccgtcacatgcactgtctcaggggtctcattacccgactatggtgtaagctggattcgccagcctccacgaaagggtctggagtggctgggagtaatatggggtagtgaaaccacatactataattcagctctcaaatccagactgaccatcatcaaggacaactccaagagccaagttttcttaaaaatgaacagtctgcaaactgatgacacagccatttactactgtgccaaacattattactacggtggtagctatgctatggactactggggccaaggaacctcagtcaccgtctcctcagggaagcctatcccgaaccctctgttgggtctcgatagtaccaatggggccgcaaccacgacgccagcgccgcgaccaccaacaccggcgcccaccatcgcgttgcagcccctgtccctgcgcccagaggcgtgccggccagcggcggggggcgcagtgcacacgagggggctggacttcgcctgtgatttttgggtgctggtggtggttggtggagtcctggcttgctatagcttgctagtaacagtggcctttattattttctgggtgaggagtaagaggagcaggctcctgcacagtgactacatgaacatgactccccgccgccccgggcccacccgcaagcattaccagccctatgccccaccacgcgacttcgcagcctatcgctccaaacggggcagaaagaaactcctgtatatattcaaacaaccatttatgagaccagtacaaactactcaagaggaagatggctgtagctgccgatttccagaagaagaagaaggaggatgtgaactggggggtaccgaattcagcgggtcaggcggatctggaagtggtggtggagaacttgatgaattggtatacttactagatgggccaggttatgaccctatacattgcgatgtagtgacaaggggcggcagccaccttttcaattttggaagcggagctactaacttcagcctgctgaagcaggctggagacgtggaggagaaccctggacctatgattcatcttggtcacatcctcttcttgctgctgttgccagttgctgccgcacaaacaaccccaggtgagaggtcaagtcttcccgccttctatccgggcacaagcgggagttgtagtgggtgtggatctttgtcccttcctatatacatctgggctcctctggctggcacttgcggagtgcttctgctgagtctggttattaccaaacggggcagaaagaaactcctgtatatattcaaacaaccatttatgagaccagtacaaactactcaagaggaagatggctgtagctgccgatttccagaagaagaagaaggaggatgtgaactgggttctgttgttattgttggtagaattattttatctggtagtggtagtatcacggcctactcccaacagacgcggggcctacttggttgcatcatcactagcctcacaggccgggacaagaaccaggtcgaaggggaggttcaagtggtttctaccgcaacacaatctttcctggcgacctgcgtcaacggcgtgtgctggactgtctaccatggcgctggctcgaagaccctagccggtccaaaaggtccaatcacccaaatgtacaccaatgtagaccaggacctcgtcggctggcaggcgcctccaggggcgcgctccttgacaccatgcacctgtggcagctcggacctttacttggtcacgagacatgctgatgtcattccggtgcgccggcgaggcgacagcaggggaagtctactctcccccaggcccgtctcctacctgaaaggctccgcaggtggtccattgctttgcccttcggggcacgctgtgggcatcttccgggctgctgtgtgcacccggggggtcgcgaaggcggtggacttcgtgcccgttgagtctatggaaactaccatgcggtctagagtgaagttcagcaggagcgcagacgcccccgcgtacaagcagggccagaaccagctctataacgagctcaatctaggacgaagagaggagtacgatgttttggacaagagacgtggccgggaccctgagatggggggaaagccgagaaggaagaaccctcaggaaggcctgtacaatgaactgcagaaagataagatggcggaggcctacagtgagattgggatgaaaggcgagcgccggaggggcaaggggcacgatggcctttaccagggtctcagtacagccaccaaggacacctacgacgcccttcacatgcaggccctgccccctcgcggcatggtgagcaagggcgaggaggataacatggccatcatcaaggagttcatgcgcttcaaggtgcacatggagggctccgtgaacggccacgagttcgagatcgagggcgagggcgagggccgcccctacgagggcacccagaccgccaagctgaaggtgaccaagggtggccccctgcccttcgcctgggacatcctgtcccctcagttcatgtacggctccaaggcctacgtgaagcaccccgccgacatccccgactacttgaagctgtccttccccgagggcttcaagtgggagcgcgtgatgaacttcgaggacggcggcgtggtgaccgtgacccaggactcctccctgcaggacggcgagttcatctacaaggtgaagctgcgcggcaccaacttcccctccgacggccccgtaatgcagaagaagaccatgggctgggaggcctcctccgagcggatgtaccccgaggacggcgccctgaagggcgagatcaagcagaggctgaagctgaaggacggcggccactacgacgctgaggtcaagaccacctacaaggccaagaagcccgtgcagctgcccggcgcctacaacgtcaacatcaagttggacatcacctcccacaacgaggactacaccatcgtggaacagtacgaacgcgccgagggccgccactccaccggcggcatggacgagctgtacaagtaa

SEQ ID NO: 111 - DNA, 3486 bp, Artificial Sequence
  synthetic polynucleotide
atggccttaccagtgaccgccttgctcctgccgctggccttgctgctccacgccgccaggccggacatccagatgacacagactacatcctccctgtctgcctctctgggagacagagtcaccatcagttgcagggcaagtcaggacattagtaaatatttaaattggtatcagcagaaaccagatggaactgttaaactcctgatctaccatacatcaagattacactcaggagtcccatcaaggttcagtggcagtgggtctggaacagattattctctcaccattagcaacctggagcaagaagatattgccacttacttttgccaacagggtaatacgcttccgtacacgttcggaggcggcaccaagctggagatcacaggtggcggtggctcgggcggtggtgggtcgggtggcggcggatctgaggtgaaactgcaggagtcaggacctggcctggtggcgccctcacagagcctgtccgtcacatgcactgtctcaggggtctcattacccgactatggtgtaagctggattcgccagcctccacgaaagggtctggagtggctgggagtaatatggggtagtgaaaccacatactataattcagctctcaaatccagactgaccatcatcaaggacaactccaagagccaagttttcttaaaaatgaacagtctgcaaactgatgacacagccatttactactgtgccaaacattattactacggtggtagctatgctatggactactggggccaaggaacctcagtcaccgtctcctcagggaagcctatcccgaaccctctgttgggtctcgatagtaccaatggggccgcaaccacgacgccagcgccgcgaccaccaacaccggcgcccaccatcgcgttgcagcccctgtccctgcgcccagaggcgtgccggccagcggcggggggcgcagtgcacacgagggggctggacttcgcctgtgatttttgggtgctggtggtggttggtggagtcctggcttgctatagcttgctagtaacagtggcctttattattttctgggtgaggagtaagaggagcaggctcctgcacagtgactacatgaacatgactccccgccgccccgggcccacccgcaagcattaccagccctatgccccaccacgcgacttcgcagcctatcgctccaaacggggcagaaagaaactcctgtatatattcaaacaaccatttatgagaccagtacaaactactcaagaggaagatggctgtagctgccgatttccagaagaagaagaaggaggatgtgaactggggggtaccgaattcagcgggtcaggcggatctggaagtggtggtggagaacttgatgaattggtatacttactagatgggccaggttatgaccctatacattgcgatgtagtgacaaggggcggcagccaccttttcaattttggaagcggagctactaacttcagcctgctgaagcaggctggagacgtggaggagaaccctggacctatgattcatcttggtcacatcctcttcttgctgctgttgccagttgctgccgcacaaacaaccccaggtgagaggtcaagtcttcccgccttctatccgggcacaagcgggagttgtagtgggtgtggatctttgtcccttcctatatacatctgggctcctctggctggcacttgcggagtgcttctgctgagtctggttattaccaaacggggcagaaagaaactcctgtatatattcaaacaaccatttatgagaccagtacaaactactcaagaggaagatggctgtagctgccgatttccagaagaagaagaaggaggatgtgaactgagagtgaagttcagcaggagcgcagacgcccccgcgtacaagcagggccagaaccagctctataacgagctcaatctaggacgaagagaggagtacgatgttttggacaagagacgtggccgggaccctgagatggggggaaagccgagaaggaagaaccctcaggaaggcctgtacaatgaactgcagaaagataagatggcggaggcctacagtgagattgggatgaaaggcgagcgccggaggggcaaggggcacgatggcctttaccagggtctcagtacagccaccaaggacacctacgacgcccttcacatgcaggccctgccccctcgcggttctgttgttattgttggtagaattattttatctggtagtggtagtatcacggcctactcccaacagacgcggggcctacttggttgcatcatcactagcctcacaggccgggacaagaaccaggtcgaaggggaggttcaagtggtttctaccgcaacacaatctttcctggcgacctgcgtcaacggcgtgtgctggactgtctaccatggcgctggctcgaagaccctagccggtccaaaaggtccaatcacccaaatgtacaccaatgtagaccaggacctcgtcggctggcaggcgcctccaggggcgcgctccttgacaccatgcacctgtggcagctcggacctttacttggtcacgagacatgctgatgtcattccggtgcgccggcgaggcgacagcaggggaagtctactctcccccaggcccgtctcctacctgaaaggctccgcaggtggtccattgctttgcccttcggggcacgctgtgggcatcttccgggctgctgtgtgcacccggggggtcgcgaaggcggtggacttcgtgcccgttgagtctatggaaactaccatgcggtctggcatggtgagcaagggcgaggaggataacatggccatcatcaaggagttcatgcgcttcaaggtgcacatggagggctccgtgaacggccacgagttcgagatcgagggcgagggcgagggccgcccctacgagggcacccagaccgccaagctgaaggtgaccaagggtggccccctgcccttcgcctgggacatcctgtcccctcagttcatgtacggctccaaggcctacgtgaagcaccccgccgacatccccgactacttgaagctgtccttccccgagggcttcaagtgggagcgcgtgatgaacttcgaggacggcggcgtggtgaccgtgacccaggactcctccctgcaggacggcgagttcatctacaaggtgaagctgcgcggcaccaacttcccctccgacggccccgtaatgcagaagaagaccatgggctgggaggcctcctccgagcggatgtaccccgaggacggcgccctgaagggcgagatcaagcagaggctgaagctgaaggacggcggccactacgacgctgaggtcaagaccacctacaaggccaagaagcccgtgcagctgcccggcgcctacaacgtcaacatcaagttggacatcacctcccacaacgaggactacaccatcgtggaacagtacgaacgcgccgagggccgccactccaccggcggcatggacgagctgtacaagtaa

SEQ ID NO: 112 - DNA, 3360 bp, Artificial Sequence
  synthetic polynucleotide
atggccttaccagtgaccgccttgctcctgccgctggccttgctgctccacgccgccaggccggacatccagatgacacagactacatcctccctgtctgcctctctgggagacagagtcaccatcagttgcagggcaagtcaggacattagtaaatatttaaattggtatcagcagaaaccagatggaactgttaaactcctgatctaccatacatcaagattacactcaggagtcccatcaaggttcagtggcagtgggtctggaacagattattctctcaccattagcaacctggagcaagaagatattgccacttacttttgccaacagggtaatacgcttccgtacacgttcggaggcggcaccaagctggagatcacaggtggcggtggctcgggcggtggtgggtcgggtggcggcggatctgaggtgaaactgcaggagtcaggacctggcctggtggcgccctcacagagcctgtccgtcacatgcactgtctcaggggtctcattacccgactatggtgtaagctggattcgccagcctccacgaaagggtctggagtggctgggagtaatatggggtagtgaaaccacatactataattcagctctcaaatccagactgaccatcatcaaggacaactccaagagccaagttttcttaaaaatgaacagtctgcaaactgatgacacagccatttactactgtgccaaacattattactacggtggtagctatgctatggactactggggccaaggaacctcagtcaccgtctcctcagggaagcctatcccgaaccctctgttgggtctcgatagtaccaatggggccgcaaccacgacgccagcgccgcgaccaccaacaccggcgcccaccatcgcgttgcagcccctgtccctgcgcccagaggcgtgccggccagcggcggggggcgcagtgcacacgagggggctggacttcgcctgtgatttttgggtgctggtggtggttggtggagtcctggcttgctatagcttgctagtaacagtggcctttattattttctgggtgaggagtaagaggagcaggctcctgcacagtgactacatgaacatgactccccgccgccccgggcccacccgcaagcattaccagccctatgccccaccacgcgacttcgcagcctatcgctccaaacggggcagaaagaaactcctgtatatattcaaacaaccatttatgagaccagtacaaactactcaagaggaagatggctgtagctgccgatttccagaagaagaagaaggaggatgtgaactggggggtaccgaattcagcgggtcaggcggatctggaagtggtggtggagaacttgatgaattggtatacttactagatgggccaggttatgaccctatacattgcgatgtagtgacaaggggcggcagccaccttttcaattttggaagcggagctactaacttcagcctgctgaagcaggctggagacgtggaggagaaccctggacctatgattcatcttggtcacatcctcttcttgctgctgttgccagttgctgccgcacaaacaaccccaggtgagaggtcaagtcttcccgccttctatccgggcacaagcgggagttgtagtgggtgtggatctttgtcccttcctatatacatctgggctcctctggctggcacttgcggagtgcttctgctgagtctggttattaccggttctgttgttattgttggtagaattattttatctggtagtggtagtatcacggcctactcccaacagacgcggggcctacttggttgcatcatcactagcctcacaggccgggacaagaaccaggtcgaaggggaggttcaagtggtttctaccgcaacacaatctttcctggcgacctgcgtcaacggcgtgtgctggactgtctaccatggcgctggctcgaagaccctagccggtccaaaaggtccaatcacccaaatgtacaccaatgtagaccaggacctcgtcggctggcaggcgcctccaggggcgcgctccttgacaccatgcacctgtggcagctcggacctttacttggtcacgagacatgctgatgtcattccggtgcgccggcgaggcgacagcaggggaagtctactctcccccaggcccgtctcctacctgaaaggctccgcaggtggtccattgctttgcccttcggggcacgctgtgggcatcttccgggctgctgtgtgcacccggggggtcgcgaaggcggtggacttcgtgcccgttgagtctatggaaactaccatgcggtctagagtgaagttcagcaggagcgcagacgcccccgcgtacaagcagggccagaaccagctctataacgagctcaatctaggacgaagagaggagtacgatgttttggacaagagacgtggccgggaccctgagatggggggaaagccgagaaggaagaaccctcaggaaggcctgtacaatgaactgcagaaagataagatggcggaggcctacagtgagattgggatgaaaggcgagcgccggaggggcaaggggcacgatggcctttaccagggtctcagtacagccaccaaggacacctacgacgcccttcacatgcaggccctgccccctcgcggcatggtgagcaagggcgaggaggataacatggccatcatcaaggagttcatgcgcttcaaggtgcacatggagggctccgtgaacggccacgagttcgagatcgagggcgagggcgagggccgcccctacgagggcacccagaccgccaagctgaaggtgaccaagggtggccccctgcccttcgcctgggacatcctgtcccctcagttcatgtacggctccaaggcctacgtgaagcaccccgccgacatccccgactacttgaagctgtccttccccgagggcttcaagtgggagcgcgtgatgaacttcgaggacggcggcgtggtgaccgtgacccaggactcctccctgcaggacggcgagttcatctacaaggtgaagctgcgcggcaccaacttcccctccgacggccccgtaatgcagaagaagaccatgggctgggaggcctcctccgagcggatgtaccccgaggacggcgccctgaagggcgagatcaagcagaggctgaagctgaaggacggcggccactacgacgctgaggtcaagaccacctacaaggccaagaagcccgtgcagctgcccggcgcctacaacgtcaacatcaagttggacatcacctcccacaacgaggactacaccatcgtggaacagtacgaacgcgccgagggccgccactccaccggcggcatggacgagctgtacaagtaa

SEQ ID NO: 113 - DNA, 3360 bp, Artificial Sequence
  synthetic polynucleotide
atggccttaccagtgaccgccttgctcctgccgctggccttgctgctccacgccgccaggccggacatccagatgacacagactacatcctccctgtctgcctctctgggagacagagtcaccatcagttgcagggcaagtcaggacattagtaaatatttaaattggtatcagcagaaaccagatggaactgttaaactcctgatctaccatacatcaagattacactcaggagtcccatcaaggttcagtggcagtgggtctggaacagattattctctcaccattagcaacctggagcaagaagatattgccacttacttttgccaacagggtaatacgcttccgtacacgttcggaggcggcaccaagctggagatcacaggtggcggtggctcgggcggtggtgggtcgggtggcggcggatctgaggtgaaactgcaggagtcaggacctggcctggtggcgccctcacagagcctgtccgtcacatgcactgtctcaggggtctcattacccgactatggtgtaagctggattcgccagcctccacgaaagggtctggagtggctgggagtaatatggggtagtgaaaccacatactataattcagctctcaaatccagactgaccatcatcaaggacaactccaagagccaagttttcttaaaaatgaacagtctgcaaactgatgacacagccatttactactgtgccaaacattattactacggtggtagctatgctatggactactggggccaaggaacctcagtcaccgtctcctcagggaagcctatcccgaaccctctgttgggtctcgatagtaccaatggggccgcaaccacgacgccagcgccgcgaccaccaacaccggcgcccaccatcgcgttgcagcccctgtccctgcgcccagaggcgtgccggccagcggcggggggcgcagtgcacacgagggggctggacttcgcctgtgatttttgggtgctggtggtggttggtggagtcctggcttgctatagcttgctagtaacagtggcctttattattttctgggtgaggagtaagaggagcaggctcctgcacagtgactacatgaacatgactccccgccgccccgggcccacccgcaagcattaccagccctatgccccaccacgcgacttcgcagcctatcgctccaaacggggcagaaagaaactcctgtatatattcaaacaaccatttatgagaccagtacaaactactcaagaggaagatggctgtagctgccgatttccagaagaagaagaaggaggatgtgaactggggggtaccgaattcagcgggtcaggcggatctggaagtggtggtggagaacttgatgaattggtatacttactagatgggccaggttatgaccctatacattgcgatgtagtgacaaggggcggcagccaccttttcaattttggaagcggagctactaacttcagcctgctgaagcaggctggagacgtggaggagaaccctggacctatgattcatcttggtcacatcctcttcttgctgctgttgccagttgctgccgcacaaacaaccccaggtgagaggtcaagtcttcccgccttctatccgggcacaagcgggagttgtagtgggtgtggatctttgtcccttcctatatacatctgggctcctctggctggcacttgcggagtgctcctgctgagtctggttattaccagagtgaagttcagcaggagcgcagacgcccccgcgtacaagcagggccagaaccagctctataacgagctcaatctaggacgaagagaggagtacgatgttttggacaagagacgtggccgggaccctgagatggggggaaagccgagaaggaagaaccctcaggaaggcctgtacaatgaactgcagaaagataagatggcggaggcctacagtgagattgggatgaaaggcgagcgccggaggggcaaggggcacgatggcctttaccagggtctcagtacagccaccaaggacacctacgacgcccttcacatgcaggccctgccccctcgcggttctgttgttattgttggtagaattattttatctggtagtggtagtatcacggcctactcccaacagacgcggggcctacttggttgcatcatcactagcctcacaggccgggacaagaaccaggtcgaaggggaggttcaagtggtttctaccgcaacacaatctttcctggcgacctgcgtcaacggcgtgtgctggactgtctaccatggcgctggctcgaagaccctagccggtccaaaaggtccaatcacccaaatgtacaccaatgtagaccaggacctcgtcggctggcaggcgcctccaggggcgcgctccttgacaccatgcacctgtggcagctcggacctttacttggtcacgagacatgctgatgtcattccggtgcgccggcgaggcgacagcaggggaagtctactctcccccaggcccgtctcctacctgaaaggctccgcaggtggtccattgctttgcccttcggggcacgctgtgggcatcttccgggctgctgtgtgcacccggggggtcgcgaaggcggtggacttcgtgcccgttgagtctatggaaactaccatgcggtctggcatggtgagcaagggcgaggaggataacatggccatcatcaaggagttcatgcgcttcaaggtgcacatggagggctccgtgaacggccacgagttcgagatcgagggcgagggcgagggccgcccctacgagggcacccagaccgccaagctgaaggtgaccaagggtggccccctgcccttcgcctgggacatcctgtcccctcagttcatgtacggctccaaggcctacgtgaagcaccccgccgacatccccgactacttgaagctgtccttccccgagggcttcaagtgggagcgcgtgatgaacttcgaggacggcggcgtggtgaccgtgacccaggactcctccctgcaggacggcgagttcatctacaaggtgaagctgcgcggcaccaacttcccctccgacggccccgtaatgcagaagaagaccatgggctgggaggcctcctccgagcggatgtaccccgaggacggcgccctgaagggcgagatcaagcagaggctgaagctgaaggacggcggccactacgacgctgaggtcaagaccacctacaaggccaagaagcccgtgcagctgcccggcgcctacaacgtcaacatcaagttggacatcacctcccacaacgaggactacaccatcgtggaacagtacgaacgcgccgagggccgccactccaccggcggcatggacgagctgtacaagtaa

SEQ ID NO: 114 - protein, 1118 aa, Artificial Sequence
  synthetic polypeptide
ALPVTALLLPLALLLHAARPDIQMTQTTSSLSASLGDRVTISCRASQDISKYLNWYQQKPDGTVKLLIYHTSRLHSGVPSRFSGSGSGTDYSLTISNLEQEDIATYFCQQGNTLPYTFGGGTKLEITGGGGSGGGGSGGGGSEVKLQESGPGLVAPSQSLSVTCTVSGVSLPDYGVSWIRQPPRKGLEWLGVIWGSETTYYNSALKSRLTIIKDNSKSQVFLKMNSLQTDDTAIYYCAKHYYYGGSYAMDYWGQGTSVTVSSGKPIPNPLLGLDSTNGAATTTPAPRPPTPAPTIALQPLSLRPEACRPAAGGAVHTRGLDFACDFWVLVVVGGVLACYSLLVTVAFIIFWVRSKRSRLLHSDYMNMTPRRPGPTRKHYQPYAPPRDFAAYRSGGTEFSGSGGSGSGGGELDELVYLLDGPGYDPIHCDVVTRGGSHLFNFGSGATNFSLLKQAGDVEENPGPMIHLGHILFLLLLPVAAAQTTPGERSSLPAFYPGTSGSCSGCGSLSLPIYIWAPLAGTCGVLLLSLVITKRGRKKLLYIFKQPFMRPVQTTQEEDGCSCRFPEEEEGGCELGSVVIVGRIILSGSGSITAYSQQTRGLLGCIITSLTGRDKNQVEGEVQVVSTATQSFLATCVNGVCWTVYHGAGSKTLAGPKGPITQMYTNVDQDLVGWQAPPGARSLTPCTCGSSDLYLVTRHADVIPVRRRGDSRGSLLSPRPVSYLKGSAGGPLLCPSGHAVGIFRAAVCTRGVAKAVDFVPVESMETTMRSRVKFSRSADAPAYKQGQNQLYNELNLGRREEYDVLDKRRGRDPEMGGKPRRKNPQEGLYNELQKDKMAEAYSEIGMKGERRRGKGHDGLYQGLSTATKDTYDALHMQALPPRGMVSKGEEDNMAIIKEFMRFKVHMEGSVNGHEFEIEGEGEGRPYEGTQTAKLKVTKGGPLPFAWDILSPQFMYGSKAYVKHPADIPDYLKLSFPEGFKWERVMNFEDGGVVTVTQDSSLQDGEFIYKVKLRGTNFPSDGPVMQKKTMGWEASSERMYPEDGALKGEIKQRLKLKDGGHYDAEVKTTYKAKKPVQLPGAYNVNIKLDITSHNEDYTIVEQYERAEGRHSTGGMDELYK

SEQ ID NO: 115 - protein, 1118 aa, Artificial Sequence
  synthetic polypeptide
ALPVTALLLPLALLLHAARPDIQMTQTTSSLSASLGDRVTISCRASQDISKYLNWYQQKPDGTVKLLIYHTSRLHSGVPSRFSGSGSGTDYSLTISNLEQEDIATYFCQQGNTLPYTFGGGTKLEITGGGGSGGGGSGGGGSEVKLQESGPGLVAPSQSLSVTCTVSGVSLPDYGVSWIRQPPRKGLEWLGVIWGSETTYYNSALKSRLTIIKDNSKSQVFLKMNSLQTDDTAIYYCAKHYYYGGSYAMDYWGQGTSVTVSSGKPIPNPLLGLDSTNGAATTTPAPRPPTPAPTIALQPLSLRPEACRPAAGGAVHTRGLDFACDFWVLVVVGGVLACYSLLVTVAFIIFWVRSKRSRLLHSDYMNMTPRRPGPTRKHYQPYAPPRDFAAYRSGGTEFSGSGGSGSGGGELDELVYLLDGPGYDPIHCDVVTRGGSHLFNFGSGATNFSLLKQAGDVEENPGPMIHLGHILFLLLLPVAAAQTTPGERSSLPAFYPGTSGSCSGCGSLSLPIYIWAPLAGTCGVLLLSLVITKRGRKKLLYIFKQPFMRPVQTTQEEDGCSCRFPEEEEGGCELRVKFSRSADAPAYKQGQNQLYNELNLGRREEYDVLDKRRGRDPEMGGKPRRKNPQEGLYNELQKDKMAEAYSEIGMKGERRRGKGHDGLYQGLSTATKDTYDALHMQALPPRGSVVIVGRIILSGSGSITAYSQQTRGLLGCIITSLTGRDKNQVEGEVQVVSTATQSFLATCVNGVCWTVYHGAGSKTLAGPKGPITQMYTNVDQDLVGWQAPPGARSLTPCTCGSSDLYLVTRHADVIPVRRRGDSRGSLLSPRPVSYLKGSAGGPLLCPSGHAVGIFRAAVCTRGVAKAVDFVPVESMETTMRSGMVSKGEEDNMAIIKEFMRFKVHMEGSVNGHEFEIEGEGEGRPYEGTQTAKLKVTKGGPLPFAWDILSPQFMYGSKAYVKHPADIPDYLKLSFPEGFKWERVMNFEDGGVVTVTQDSSLQDGEFIYKVKLRGTNFPSDGPVMQKKTMGWEASSERMYPEDGALKGEIKQRLKLKDGGHYDAEVKTTYKAKKPVQLPGAYNVNIKLDITSHNEDYTIVEQYERAEGRHSTGGMDELYK

SEQ ID NO: 116 - protein, 1076 aa, Artificial Sequence
  synthetic polypeptide
ALPVTALLLPLALLLHAARPDIQMTQTTSSLSASLGDRVTISCRASQDISKYLNWYQQKPDGTVKLLIYHTSRLHSGVPSRFSGSGSGTDYSLTISNLEQEDIATYFCQQGNTLPYTFGGGTKLEITGGGGSGGGGSGGGGSEVKLQESGPGLVAPSQSLSVTCTVSGVSLPDYGVSWIRQPPRKGLEWLGVIWGSETTYYNSALKSRLTIIKDNSKSQVFLKMNSLQTDDTAIYYCAKHYYYGGSYAMDYWGQGTSVTVSSGKPIPNPLLGLDSTNGAATTTPAPRPPTPAPTIALQPLSLRPEACRPAAGGAVHTRGLDFACDFWVLVVVGGVLACYSLLVTVAFIIFWVRSKRSRLLHSDYMNMTPRRPGPTRKHYQPYAPPRDFAAYRSGGTEFSGSGGSGSGGGELDELVYLLDGPGYDPIHCDVVTRGGSHLFNFGSGATNFSLLKQAGDVEENPGPMIHLGHILFLLLLPVAAAQTTPGERSSLPAFYPGTSGSCSGCGSLSLPIYIWAPLAGTCGVLLLSLVITGSVVIVGRIILSGSGSITAYSQQTRGLLGCIITSLTGRDKNQVEGEVQVVSTATQSFLATCVNGVCWTVYHGAGSKTLAGPKGPITQMYTNVDQDLVGWQAPPGARSLTPCTCGSSDLYLVTRHADVIPVRRRGDSRGSLLSPRPVSYLKGSAGGPLLCPSGHAVGIFRAAVCTRGVAKAVDFVPVESMETTMRSRVKFSRSADAPAYKQGQNQLYNELNLGRREEYDVLDKRRGRDPEMGGKPRRKNPQEGLYNELQKDKMAEAYSEIGMKGERRRGKGHDGLYQGLSTATKDTYDALHMQALPPRGMVSKGEEDNMAIIKEFMRFKVHMEGSVNGHEFEIEGEGEGRPYEGTQTAKLKVTKGGPLPFAWDILSPQFMYGSKAYVKHPADIPDYLKLSFPEGFKWERVMNFEDGGVVTVTQDSSLQDGEFIYKVKLRGTNFPSDGPVMQKKTMGWEASSERMYPEDGALKGEIKQRLKLKDGGHYDAEVKTTYKAKKPVQLPGAYNVNIKLDITSHNEDYTIVEQYERAEGRHSTGGMDELYK

SEQ ID NO: 117 - protein, 1076 aa, Artificial Sequence
  synthetic polypeptide
ALPVTALLLPLALLLHAARPDIQMTQTTSSLSASLGDRVTISCRASQDISKYLNWYQQKPDGTVKLLIYHTSRLHSGVPSRFSGSGSGTDYSLTISNLEQEDIATYFCQQGNTLPYTFGGGTKLEITGGGGSGGGGSGGGGSEVKLQESGPGLVAPSQSLSVTCTVSGVSLPDYGVSWIRQPPRKGLEWLGVIWGSETTYYNSALKSRLTIIKDNSKSQVFLKMNSLQTDDTAIYYCAKHYYYGGSYAMDYWGQGTSVTVSSGKPIPNPLLGLDSTNGAATTTPAPRPPTPAPTIALQPLSLRPEACRPAAGGAVHTRGLDFACDFWVLVVVGGVLACYSLLVTVAFIIFWVRSKRSRLLHSDYMNMTPRRPGPTRKHYQPYAPPRDFAAYRSGGTEFSGSGGSGSGGGELDELVYLLDGPGYDPIHCDVVTRGGSHLFNFGSGATNFSLLKQAGDVEENPGPMIHLGHILFLLLLPVAAAQTTPGERSSLPAFYPGTSGSCSGCGSLSLPIYIWAPLAGTCGVLLLSLVITRVKFSRSADAPAYKQGQNQLYNELNLGRREEYDVLDKRRGRDPEMGGKPRRKNPQEGLYNELQKDKMAEAYSEIGMKGERRRGKGHDGLYQGLSTATKDTYDALHMQALPPRGSVVIVGRIILSGSGSITAYSQQTRGLLGCIITSLTGRDKNQVEGEVQVVSTATQSFLATCVNGVCWTVYHGAGSKTLAGPKGPITQMYTNVDQDLVGWQAPPGARSLTPCTCGSSDLYLVTRHADVIPVRRRGDSRGSLLSPRPVSYLKGSAGGPLLCPSGHAVGIFRAAVCTRGVAKAVDFVPVESMETTMRSGMVSKGEEDNMAIIKEFMRFKVHMEGSVNGHEFEIEGEGEGRPYEGTQTAKLKVTKGGPLPFAWDILSPQFMYGSKAYVKHPADIPDYLKLSFPEGFKWERVMNFEDGGVVTVTQDSSLQDGEFIYKVKLRGTNFPSDGPVMQKKTMGWEASSERMYPEDGALKGEIKQRLKLKDGGHYDAEVKTTYKAKKPVQLPGAYNVNIKLDITSHNEDYTIVEQYERAEGRHSTGGMDELYK

SEQ ID NO: 118 - protein, 1160 aa, Artificial Sequence
  synthetic polypeptide
ALPVTALLLPLALLLHAARPDIQMTQTTSSLSASLGDRVTISCRASQDISKYLNWYQQKPDGTVKLLIYHTSRLHSGVPSRFSGSGSGTDYSLTISNLEQEDIATYFCQQGNTLPYTFGGGTKLEITGGGGSGGGGSGGGGSEVKLQESGPGLVAPSQSLSVTCTVSGVSLPDYGVSWIRQPPRKGLEWLGVIWGSETTYYNSALKSRLTIIKDNSKSQVFLKMNSLQTDDTAIYYCAKHYYYGGSYAMDYWGQGTSVTVSSGKPIPNPLLGLDSTNGAATTTPAPRPPTPAPTIALQPLSLRPEACRPAAGGAVHTRGLDFACDFWVLVVVGGVLACYSLLVTVAFIIFWVRSKRSRLLHSDYMNMTPRRPGPTRKHYQPYAPPRDFAAYRSKRGRKKLLYIFKQPFMRPVQTTQEEDGCSCRFPEEEEGGCELGGTEFSGSGGSGSGGGELDELVYLLDGPGYDPIHCDVVTRGGSHLFNFGSGATNFSLLKQAGDVEENPGPMIHLGHILFLLLLPVAAAQTTPGERSSLPAFYPGTSGSCSGCGSLSLPIYIWAPLAGTCGVLLLSLVITKRGRKKLLYIFKQPFMRPVQTTQEEDGCSCRFPEEEEGGCELGSVVIVGRIILSGSGSITAYSQQTRGLLGCIITSLTGRDKNQVEGEVQVVSTATQSFLATCVNGVCWTVYHGAGSKTLAGPKGPITQMYTNVDQDLVGWQAPPGARSLTPCTCGSSDLYLVTRHADVIPVRRRGDSRGSLLSPRPVSYLKGSAGGPLLCPSGHAVGIFRAAVCTRGVAKAVDFVPVESMETTMRSRVKFSRSADAPAYKQGQNQLYNELNLGRREEYDVLDKRRGRDPEMGGKPRRKNPQEGLYNELQKDKMAEAYSEIGMKGERRRGKGHDGLYQGLSTATKDTYDALHMQALPPRGMVSKGEEDNMAIIKEFMRFKVHMEGSVNGHEFEIEGEGEGRPYEGTQTAKLKVTKGGPLPFAWDILSPQFMYGSKAYVKHPADIPDYLKLSFPEGFKWERVMNFEDGGVVTVTQDSSLQDGEFIYKVKLRGTNFPSDGPVMQKKTMGWEASSERMYPEDGALKGEIKQRLKLKDGGHYDAEVKTTYKAKKPVQLPGAYNVNIKLDITSHNEDYTIVEQYERAEGRHSTGGMDELYK

SEQ ID NO: 119 - protein, 1160 aa, Artificial Sequence
  synthetic polypeptide
ALPVTALLLPLALLLHAARPDIQMTQTTSSLSASLGDRVTISCRASQDISKYLNWYQQKPDGTVKLLIYHTSRLHSGVPSRFSGSGSGTDYSLTISNLEQEDIATYFCQQGNTLPYTFGGGTKLEITGGGGSGGGGSGGGGSEVKLQESGPGLVAPSQSLSVTCTVSGVSLPDYGVSWIRQPPRKGLEWLGVIWGSETTYYNSALKSRLTIIKDNSKSQVFLKMNSLQTDDTAIYYCAKHYYYGGSYAMDYWGQGTSVTVSSGKPIPNPLLGLDSTNGAATTTPAPRPPTPAPTIALQPLSLRPEACRPAAGGAVHTRGLDFACDFWVLVVVGGVLACYSLLVTVAFIIFWVRSKRSRLLHSDYMNMTPRRPGPTRKHYQPYAPPRDFAAYRSKRGRKKLLYIFKQPFMRPVQTTQEEDGCSCRFPEEEEGGCELGGTEFSGSGGSGSGGGELDELVYLLDGPGYDPIHCDVVTRGGSHLFNFGSGATNFSLLKQAGDVEENPGPMIHLGHILFLLLLPVAAAQTTPGERSSLPAFYPGTSGSCSGCGSLSLPIYIWAPLAGTCGVLLLSLVITKRGRKKLLYIFKQPFMRPVQTTQEEDGCSCRFPEEEEGGCELRVKFSRSADAPAYKQGQNQLYNELNLGRREEYDVLDKRRGRDPEMGGKPRRKNPQEGLYNELQKDKMAEAYSEIGMKGERRRGKGHDGLYQGLSTATKDTYDALHMQALPPRGSVVIVGRIILSGSGSITAYSQQTRGLLGCIITSLTGRDKNQVEGEVQVVSTATQSFLATCVNGVCWTVYHGAGSKTLAGPKGPITQMYTNVDQDLVGWQAPPGARSLTPCTCGSSDLYLVTRHADVIPVRRRGDSRGSLLSPRPVSYLKGSAGGPLLCPSGHAVGIFRAAVCTRGVAKAVDFVPVESMETTMRSGMVSKGEEDNMAIIKEFMRFKVHMEGSVNGHEFEIEGEGEGRPYEGTQTAKLKVTKGGPLPFAWDILSPQFMYGSKAYVKHPADIPDYLKLSFPEGFKWERVMNFEDGGVVTVTQDSSLQDGEFIYKVKLRGTNFPSDGPVMQKKTMGWEASSERMYPEDGALKGEIKQRLKLKDGGHYDAEVKTTYKAKKPVQLPGAYNVNIKLDITSHNEDYTIVEQYERAEGRHSTGGMDELYK

SEQ ID NO: 120 - protein, 1118 aa, Artificial Sequence
  synthetic polypeptide
ALPVTALLLPLALLLHAARPDIQMTQTTSSLSASLGDRVTISCRASQDISKYLNWYQQKPDGTVKLLIYHTSRLHSGVPSRFSGSGSGTDYSLTISNLEQEDIATYFCQQGNTLPYTFGGGTKLEITGGGGSGGGGSGGGGSEVKLQESGPGLVAPSQSLSVTCTVSGVSLPDYGVSWIRQPPRKGLEWLGVIWGSETTYYNSALKSRLTIIKDNSKSQVFLKMNSLQTDDTAIYYCAKHYYYGGSYAMDYWGQGTSVTVSSGKPIPNPLLGLDSTNGAATTTPAPRPPTPAPTIALQPLSLRPEACRPAAGGAVHTRGLDFACDFWVLVVVGGVLACYSLLVTVAFIIFWVRSKRSRLLHSDYMNMTPRRPGPTRKHYQPYAPPRDFAAYRSKRGRKKLLYIFKQPFMRPVQTTQEEDGCSCRFPEEEEGGCELGGTEFSGSGGSGSGGGELDELVYLLDGPGYDPIHCDVVTRGGSHLFNFGSGATNFSLLKQAGDVEENPGPMIHLGHILFLLLLPVAAAQTTPGERSSLPAFYPGTSGSCSGCGSLSLPIYIWAPLAGTCGVLLLSLVITGSVVIVGRIILSGSGSITAYSQQTRGLLGCIITSLTGRDKNQVEGEVQVVSTATQSFLATCVNGVCWTVYHGAGSKTLAGPKGPITQMYTNVDQDLVGWQAPPGARSLTPCTCGSSDLYLVTRHADVIPVRRRGDSRGSLLSPRPVSYLKGSAGGPLLCPSGHAVGIFRAAVCTRGVAKAVDFVPVESMETTMRSRVKFSRSADAPAYKQGQNQLYNELNLGRREEYDVLDKRRGRDPEMGGKPRRKNPQEGLYNELQKDKMAEAYSEIGMKGERRRGKGHDGLYQGLSTATKDTYDALHMQALPPRGMVSKGEEDNMAIIKEFMRFKVHMEGSVNGHEFEIEGEGEGRPYEGTQTAKLKVTKGGPLPFAWDILSPQFMYGSKAYVKHPADIPDYLKLSFPEGFKWERVMNFEDGGVVTVTQDSSLQDGEFIYKVKLRGTNFPSDGPVMQKKTMGWEASSERMYPEDGALKGEIKQRLKLKDGGHYDAEVKTTYKAKKPVQLPGAYNVNIKLDITSHNEDYTIVEQYERAEGRHSTGGMDELYK

SEQ ID NO: 121 - protein, 1118 aa, Artificial Sequence
  synthetic polypeptide
ALPVTALLLPLALLLHAARPDIQMTQTTSSLSASLGDRVTISCRASQDISKYLNWYQQKPDGTVKLLIYHTSRLHSGVPSRFSGSGSGTDYSLTISNLEQEDIATYFCQQGNTLPYTFGGGTKLEITGGGGSGGGGSGGGGSEVKLQESGPGLVAPSQSLSVTCTVSGVSLPDYGVSWIRQPPRKGLEWLGVIWGSETTYYNSALKSRLTIIKDNSKSQVFLKMNSLQTDDTAIYYCAKHYYYGGSYAMDYWGQGTSVTVSSGKPIPNPLLGLDSTNGAATTTPAPRPPTPAPTIALQPLSLRPEACRPAAGGAVHTRGLDFACDFWVLVVVGGVLACYSLLVTVAFIIFWVRSKRSRLLHSDYMNMTPRRPGPTRKHYQPYAPPRDFAAYRSKRGRKKLLYIFKQPFMRPVQTTQEEDGCSCRFPEEEEGGCELGGTEFSGSGGSGSGGGELDELVYLLDGPGYDPIHCDVVTRGGSHLFNFGSGATNFSLLKQAGDVEENPGPMIHLGHILFLLLLPVAAAQTTPGERSSLPAFYPGTSGSCSGCGSLSLPIYIWAPLAGTCGVLLLSLVITRVKFSRSADAPAYKQGQNQLYNELNLGRREEYDVLDKRRGRDPEMGGKPRRKNPQEGLYNELQKDKMAEAYSEIGMKGERRRGKGHDGLYQGLSTATKDTYDALHMQALPPRGSVVIVGRIILSGSGSITAYSQQTRGLLGCIITSLTGRDKNQVEGEVQVVSTATQSFLATCVNGVCWTVYHGAGSKTLAGPKGPITQMYTNVDQDLVGWQAPPGARSLTPCTCGSSDLYLVTRHADVIPVRRRGDSRGSLLSPRPVSYLKGSAGGPLLCPSGHAVGIFRAAVCTRGVAKAVDFVPVESMETTMRSGMVSKGEEDNMAIIKEFMRFKVHMEGSVNGHEFEIEGEGEGRPYEGTQTAKLKVTKGGPLPFAWDILSPQFMYGSKAYVKHPADIPDYLKLSFPEGFKWERVMNFEDGGVVTVTQDSSLQDGEFIYKVKLRGTNFPSDGPVMQKKTMGWEASSERMYPEDGALKGEIKQRLKLKDGGHYDAEVKTTYKAKKPVQLPGAYNVNIKLDITSHNEDYTIVEQYERAEGRHSTGGMDELYK

SEQ ID NO: 122 - DNA, 66 bp, Artificial Sequence
  synthetic polynucleotide
ggaagcggagctactaacttcagcctgctgaagcaggctggagacgtggaggagaaccctggacct

SEQ ID NO: 123 - protein, 22 aa, Artificial Sequence
  synthetic polypeptide
GSGATNFSLLKQAGDVEENPGP

SEQ ID NO: 124 - DNA, 63 bp, Artificial Sequence
  synthetic polynucleotide
atatacatctgggctcctctggctggcacttgcggagtgctcctgctgagtctggttattacc

SEQ ID NO: 125 - DNA, 3915 bp, Artificial Sequence
  synthetic polynucleotide
atggccttaccagtgaccgccttgctcctgccgctggccttgctgctccacgccgccaggccggacatccagatgacacagactacatcctccctgtctgcctctctgggagacagagtcaccatcagttgcagggcaagtcaggacattagtaaatatttaaattggtatcagcagaaaccagatggaactgttaaactcctgatctaccatacatcaagattacactcaggagtcccatcaaggttcagtggcagtgggtctggaacagattattctctcaccattagcaacctggagcaagaagatattgccacttacttttgccaacagggtaatacgcttccgtacacgttcggaggcggcaccaagctggagatcacaggtggcggtggctcgggcggtggtgggtcgggtggcggcggatctgaggtgaaactgcaggagtcaggacctggcctggtggcgccctcacagagcctgtccgtcacatgcactgtctcaggggtctcattacccgactatggtgtaagctggattcgccagcctccacgaaagggtctggagtggctgggagtaatatggggtagtgaaaccacatactataattcagctctcaaatccagactgaccatcatcaaggacaactccaagagccaagttttcttaaaaatgaacagtctgcaaactgatgacacagccatttactactgtgccaaacattattactacggtggtagctatgctatggactactggggccaaggaacctcagtcaccgtctcctcagggaagcctatcccgaaccctctgttgggtctcgatagtaccaatggggccgcaaccacgacgccagcgccgcgaccaccaacaccggcgcccaccatcgcgttgcagcccctgtccctgcgcccagaggcgtgccggccagcggcggggggcgcagtgcacacgagggggctggacttcgcctgtgatttttgggtgctggtggtggttggtggagtcctggcttgctatagcttgctagtaacagtggcctttattattttctgggtgaggagtaagaggagcaggctcctgcacagtgactacatgaacatgactccccgccgccccgggcccacccgcaagcattaccagccctatgccccaccacgcgacttcgcagcctatcgctccggctcaggaagctcttccgacgaagaagaagcgcgcgagctgatcgagcgtgcgaaggaggctgcggaacgcgcgcaagaagctgctgagcgtaccggtgatccgcgcgtgcgtgaactcgctcgtgagctgaaacgcctggctcaggaagctgctgaagaagtgaagcgtgacccgtcttcctccgatgtgaacgaagcgctcaaactcatcgtggaagctatcgaggcggctgtggacgcgctcgaagcggctgaacgcaccggcgacccggaggttcgtgagctggcgcgtgagctcgtgcgcctcgcggttgaggctgcggaggaggtgcaacgtaacccatcctcctctgacgtgaatgaggctctccacagcatagtttacgctattgaagctgccatttttgcattggaagctgccgaaaggactggtgacccggaagtgagagaactcgcccgagagcttgtaagactggcggttgaggcggctgaagaagtccagcgaaatccgtccagccggaatgtcgagcacgcactgatgaggattgtgttggccatttacctggcagaagaaaatctccgcgaagctgaggagtctggcgatccggaaaaacgtgaaaaggctcgcgaacgtgttcgtgaggcggtggaacgtgcggaagaggttcagcgtgatccatccggttggctgaatcatggcagtggagagggcagaggaagtctgctaacatgcggtgacgtcgaggagaatcctggcccaatgattcatcttggtcacatcctcttcttgctgctgttgccagttgctgccgcacaaacaaccccaggtgagaggtcaagtcttcccgccttctatccgggcacaagcgggagttgtagtgggtgtggatctttgtcccttcctatatacatctgggctcctctggctggcacttgcggagtgcttctgctgagtctggttattaccaaacggggcagaaagaaactcctgtatatattcaaacaaccatttatgagaccagtacaaactactcaagaggaagatggctgtagctgccgatttccagaagaagaagaaggaggatgtgaactgggctgcgtggtcatagtgggcaggatcgtcttgtccggatccggcactagtatcacggcctactcccaacagacgcggggcctacttggttgcatcatcactagcctcacaggccgggacaagaaccaggtcgaaggggaggttcaagtggtttctaccgcaacacaatctttcctggcgacctgcgtcaacggcgtgtgctggactgtctaccatggcgctggctcgaagaccctagccggtccaaaaggtccaatcacccaaatgtacaccaatgtagaccaggacctcgtcggctggcaggcgcctccaggggcgcgctccttgacaccatgcacctgtggcagctcggacctttacttggtcacgagacatgctgatgtcattccggtgcgccggcgaggcgacagcaggggaagtctactctcccccaggcccgtctcctacctgaaaggctccgcaggtggtccattgctttgcccttcggggcacgctgtgggcatcttccgggctgctgtgtgcacccggggggtcgcgaaggcggtggacttcgtgcccgttgagtctatggaaactaccatgcggtctagagtgaagttcagcaggagcgcagacgcccccgcgtacaagcagggccagaaccagctctataacgagctcaatctaggacgaagagaggagtacgatgttttggacaagagacgtggccgggaccctgagatggggggaaagccgagaaggaagaaccctcaggaaggcctgtacaatgaactgcagaaagataagatggcggaggcctacagtgagattgggatgaaaggcgagcgccggaggggcaaggggcacgatggcctttaccagggtctcagtacagccaccaaggacacctacgacgcccttcacatgcaggccctgccccctcgcggcatggtgagcaagggcgaggaggataacatggccatcatcaaggagttcatgcgcttcaaggtgcacatggagggctccgtgaacggccacgagttcgagatcgagggcgagggcgagggccgcccctacgagggcacccagaccgccaagctgaaggtgaccaagggtggccccctgcccttcgcctgggacatcctgtcccctcagttcatgtacggctccaaggcctacgtgaagcaccccgccgacatccccgactacttgaagctgtccttccccgagggcttcaagtgggagcgcgtgatgaacttcgaggacggcggcgtggtgaccgtgacccaggactcctccctgcaggacggcgagttcatctacaaggtgaagctgcgcggcaccaacttcccctccgacggccccgtaatgcagaagaagaccatgggctgggaggcctcctccgagcggatgtaccccgaggacggcgccctgaagggcgagatcaagcagaggctgaagctgaaggacggcggccactacgacgctgaggtcaagaccacctacaaggccaagaagcccgtgcagctgcccggcgcctacaacgtcaacatcaagttggacatcacctcccacaacgaggactacaccatcgtggaacagtacgaacgcgccgagggccgccactccaccggcggcatggacgagctgtacaagtaa

SEQ ID NO: 126 - DNA, 3927 bp, Artificial Sequence
  synthetic polynucleotide
atggccttaccagtgaccgccttgctcctgccgctggccttgctgctccacgccgccaggccggacatccagatgacacagactacatcctccctgtctgcctctctgggagacagagtcaccatcagttgcagggcaagtcaggacattagtaaatatttaaattggtatcagcagaaaccagatggaactgttaaactcctgatctaccatacatcaagattacactcaggagtcccatcaaggttcagtggcagtgggtctggaacagattattctctcaccattagcaacctggagcaagaagatattgccacttacttttgccaacagggtaatacgcttccgtacacgttcggaggcggcaccaagctggagatcacaggtggcggtggctcgggcggtggtgggtcgggtggcggcggatctgaggtgaaactgcaggagtcaggacctggcctggtggcgccctcacagagcctgtccgtcacatgcactgtctcaggggtctcattacccgactatggtgtaagctggattcgccagcctccacgaaagggtctggagtggctgggagtaatatggggtagtgaaaccacatactataattcagctctcaaatccagactgaccatcatcaaggacaactccaagagccaagttttcttaaaaatgaacagtctgcaaactgatgacacagccatttactactgtgccaaacattattactacggtggtagctatgctatggactactggggccaaggaacctcagtcaccgtctcctcagggaagcctatcccgaaccctctgttgggtctcgatagtaccaatggggccgcaaccacgacgccagcgccgcgaccaccaacaccggcgcccaccatcgcgttgcagcccctgtccctgcgcccagaggcgtgccggccagcggcggggggcgcagtgcacacgagggggctggacttcgcctgtgatttttgggtgctggtggtggttggtggagtcctggcttgctatagcttgctagtaacagtggcctttattattttctgggtgaggagtaagaggagcaggctcctgcacagtgactacatgaacatgactccccgccgccccgggcccacccgcaagcattaccagccctatgccccaccacgcgacttcgcagcctatcgctccggctcaggaagcgatatcgagaagctttgcaaaaaagctgaagaagaggcaaaggaggcgcaagagaaagctgatgagttgcggcaacggcaccccgacagccaggctgctgaggatgctgaggacttggcaaatctggcggtggccgctgtcttgacggcttgcttgttggcccaagaacatccaaacgctgacattgcaaagctttgcattaaggccgcgtccgaagcggctgaagcagcttctaaggcagccgagctggcgcaacggcatcctgactcccaagcggcgagggacgctataaaactcgcatcacaagcagccagagctgtaatcctcgctattatgctcgcagccgaaaacccaaacgctgatattgccaaactgtgtataaaggcggctagtgaagccgcagaagctgcaagcaaagcagcagaacttgcccaacgccaccccgactcccaggcggctagagatgctataaaacttgcttctcaggctgcggaggcggtagaacgagcgatctggctggcagcagagaaccccaacgctgacattgccaaaaagtgtatcaaggcggcttccgaagccgccgaggaggccagcaaagcggcggaagaggcacagagacatccggactcacagaaagcacgcgacgagattaaagaggctagtcaaaaagcagaggaggtaaaagaacgctgtaagtccggcagtggagagggcagaggaagtctgctaacatgcggtgacgtcgaggagaatcctggcccaatgattcatcttggtcacatcctcttcttgctgctgttgccagttgctgccgcacaaacaaccccaggtgagaggtcaagtcttcccgccttctatccgggcacaagcgggagttgtagtgggtgtggatctttgtcccttcctatatacatctgggctcctctggctggcacttgcggagtgcttctgctgagtctggttattaccaaacggggcagaaagaaactcctgtatatattcaaacaaccatttatgagaccagtacaaactactcaagaggaagatggctgtagctgccgatttccagaagaagaagaaggaggatgtgaactgggctgcgtggtcatagtgggcaggatcgtcttgtccggatccggcactagtatcacggcctactcccaacagacgcggggcctacttggttgcatcatcactagcctcacaggccgggacaagaaccaggtcgaaggggaggttcaagtggtttctaccgcaacacaatctttcctggcgacctgcgtcaacggcgtgtgctggactgtctaccatggcgctggctcgaagaccctagccggtccaaaaggtccaatcacccaaatgtacaccaatgtagaccaggacctcgtcggctggcaggcgcctccaggggcgcgctccttgacaccatgcacctgtggcagctcggacctttacttggtcacgagacatgctgatgtcattccggtgcgccggcgaggcgacagcaggggaagtctactctcccccaggcccgtctcctacctgaaaggctccgcaggtggtccattgctttgcccttcggggcacgctgtgggcatcttccgggctgctgtgtgcacccggggggtcgcgaaggcggtggacttcgtgcccgttgagtctatggaaactaccatgcggtctagagtgaagttcagcaggagcgcagacgcccccgcgtacaagcagggccagaaccagctctataacgagctcaatctaggacgaagagaggagtacgatgttttggacaagagacgtggccgggaccctgagatggggggaaagccgagaaggaagaaccctcaggaaggcctgtacaatgaactgcagaaagataagatggcggaggcctacagtgagattgggatgaaaggcgagcgccggaggggcaaggggcacgatggcctttaccagggtctcagtacagccaccaaggacacctacgacgcccttcacatgcaggccctgccccctcgcggcatggtgagcaagggcgaggaggataacatggccatcatcaaggagttcatgcgcttcaaggtgcacatggagggctccgtgaacggccacgagttcgagatcgagggcgagggcgagggccgcccctacgagggcacccagaccgccaagctgaaggtgaccaagggtggccccctgcccttcgcctgggacatcctgtcccctcagttcatgtacggctccaaggcctacgtgaagcaccccgccgacatccccgactacttgaagctgtccttccccgagggcttcaagtgggagcgcgtgatgaacttcgaggacggcggcgtggtgaccgtgacccaggactcctccctgcaggacggcgagttcatctacaaggtgaagctgcgcggcaccaacttcccctccgacggccccgtaatgcagaagaagaccatgggctgggaggcctcctccgagcggatgtaccccgaggacggcgccctgaagggcgagatcaagcagaggctgaagctgaaggacggcggccactacgacgctgaggtcaagaccacctacaaggccaagaagcccgtgcagctgcccggcgcctacaacgtcaacatcaagttggacatcacctcccacaacgaggactacaccatcgtggaacagtacgaacgcgccgagggccgccactccaccggcggcatggacgagctgtacaagtaa

SEQ ID NO: 127 - protein, 1303 aa, Artificial Sequence
  synthetic polypeptide
ALPVTALLLPLALLLHAARPDIQMTQTTSSLSASLGDRVTISCRASQDISKYLNWYQQKPDGTVKLLIYHTSRLHSGVPSRFSGSGSGTDYSLTISNLEQEDIATYFCQQGNTLPYTFGGGTKLEITGGGGSGGGGSGGGGSEVKLQESGPGLVAPSQSLSVTCTVSGVSLPDYGVSWIRQPPRKGLEWLGVIWGSETTYYNSALKSRLTIIKDNSKSQVFLKMNSLQTDDTAIYYCAKHYYYGGSYAMDYWGQGTSVTVSSGKPIPNPLLGLDSTNGAATTTPAPRPPTPAPTIALQPLSLRPEACRPAAGGAVHTRGLDFACDFWVLVVVGGVLACYSLLVTVAFIIFWVRSKRSRLLHSDYMNMTPRRPGPTRKHYQPYAPPRDFAAYRSGSGSSSDEEEARELIERAKEAAERAQEAAERTGDPRVRELARELKRLAQEAAEEVKRDPSSSDVNEALKLIVEAIEAAVDALEAAERTGDPEVRELARELVRLAVEAAEEVQRNPSSSDVNEALHSIVYAIEAAIFALEAAERTGDPEVRELARELVRLAVEAAEEVQRNPSSRNVEHALMRIVLAIYLAEENLREAEESGDPEKREKARERVREAVERAEEVQRDPSGWLNHGSGEGRGSLLTCGDVEENPGPMIHLGHILFLLLLPVAAAQTTPGERSSLPAFYPGTSGSCSGCGSLSLPIYIWAPLAGTCGVLLLSLVITKRGRKKLLYIFKQPFMRPVQTTQEEDGCSCRFPEEEEGGCELGCVVIVGRIVLSGSGTSITAYSQQTRGLLGCIITSLTGRDKNQVEGEVQVVSTATQSFLATCVNGVCWTVYHGAGSKTLAGPKGPITQMYTNVDQDLVGWQAPPGARSLTPCTCGSSDLYLVTRHADVIPVRRRGDSRGSLLSPRPVSYLKGSAGGPLLCPSGHAVGIFRAAVCTRGVAKAVDFVPVESMETTMRSRVKFSRSADAPAYKQGQNQLYNELNLGRREEYDVLDKRRGRDPEMGGKPRRKNPQEGLYNELQKDKMAEAYSEIGMKGERRRGKGHDGLYQGLSTATKDTYDALHMQALPPRGMVSKGEEDNMAIIKEFMRFKVHMEGSVNGHEFEIEGEGEGRPYEGTQTAKLKVTKGGPLPFAWDILSPQFMYGSKAYVKHPADIPDYLKLSFPEGFKWERVMNFEDGGVVTVTQDSSLQDGEFIYKVKLRGTNFPSDGPVMQKKTMGWEASSERMYPEDGALKGEIKQRLKLKDGGHYDAEVKTTYKAKKPVQLPGAYNVNIKLDITSHNEDYTIVEQYERAEGRHSTGGMDELYK

SEQ ID NO: 128 - protein, 1307 aa, Artificial Sequence
  synthetic polypeptide
ALPVTALLLPLALLLHAARPDIQMTQTTSSLSASLGDRVTISCRASQDISKYLNWYQQKPDGTVKLLIYHTSRLHSGVPSRFSGSGSGTDYSLTISNLEQEDIATYFCQQGNTLPYTFGGGTKLEITGGGGSGGGGSGGGGSEVKLQESGPGLVAPSQSLSVTCTVSGVSLPDYGVSWIRQPPRKGLEWLGVIWGSETTYYNSALKSRLTIIKDNSKSQVFLKMNSLQTDDTAIYYCAKHYYYGGSYAMDYWGQGTSVTVSSGKPIPNPLLGLDSTNGAATTTPAPRPPTPAPTIALQPLSLRPEACRPAAGGAVHTRGLDFACDFWVLVVVGGVLACYSLLVTVAFIIFWVRSKRSRLLHSDYMNMTPRRPGPTRKHYQPYAPPRDFAAYRSGSGSDIEKLCKKAEEEAKEAQEKADELRQRHPDSQAAEDAEDLANLAVAAVLTACLLAQEHPNADIAKLCIKAASEAAEAASKAAELAQRHPDSQAARDAIKLASQAARAVILAIMLAAENPNADIAKLCIKAASEAAEAASKAAELAQRHPDSQAARDAIKLASQAAEAVERAIWLAAENPNADIAKKCIKAASEAAEEASKAAEEAQRHPDSQKARDEIKEASQKAEEVKERCKSGSGEGRGSLLTCGDVEENPGPMIHLGHILFLLLLPVAAAQTTPGERSSLPAFYPGTSGSCSGCGSLSLPIYIWAPLAGTCGVLLLSLVITKRGRKKLLYIFKQPFMRPVQTTQEEDGCSCRFPEEEEGGCELGCVVIVGRIVLSGSGTSITAYSQQTRGLLGCIITSLTGRDKNQVEGEVQVVSTATQSFLATCVNGVCWTVYHGAGSKTLAGPKGPITQMYTNVDQDLVGWQAPPGARSLTPCTCGSSDLYLVTRHADVIPVRRRGDSRGSLLSPRPVSYLKGSAGGPLLCPSGHAVGIFRAAVCTRGVAKAVDFVPVESMETTMRSRVKFSRSADAPAYKQGQNQLYNELNLGRREEYDVLDKRRGRDPEMGGKPRRKNPQEGLYNELQKDKMAEAYSEIGMKGERRRGKGHDGLYQGLSTATKDTYDALHMQALPPRGMVSKGEEDNMAIIKEFMRFKVHMEGSVNGHEFEIEGEGEGRPYEGTQTAKLKVTKGGPLPFAWDILSPQFMYGSKAYVKHPADIPDYLKLSFPEGFKWERVMNFEDGGVVTVTQDSSLQDGEFIYKVKLRGTNFPSDGPVMQKKTMGWEASSERMYPEDGALKGEIKQRLKLKDGGHYDAEVKTTYKAKKPVQLPGAYNVNIKLDITSHNEDYTIVEQYERAEGRHSTGGMDELYK

SEQ ID NO: 129 - protein, 180 aa, Artificial Sequence
  synthetic polypeptide
APITAYAQQTRGLLGCIITSLTGRDKNQVEGEVQIVSTATQTFLATCINGVCWTVYHGAGTRTIASPKGPVIQMYTNVDQDLVGWPAPQGSRSLTPCTCGSSDLYLVTRHADVIPVRRRGDSRGSLLSPRPISYLKGSSGGPLLCPAGHAVGLFRAAVCTRGVAKAVDFIPVENLETTMR

SEQ ID NO: 130 - protein, 180 aa, Artificial Sequence
  synthetic polypeptide
APITAYSQQTRGLLGCIITSLTGRDKNQVEGEVQVVSTATQSFLATCVNGVCWTVYHGAGSKTLAGPKGPITQMYTNVDQDLVGWQAPPGARSLTPCTCGSSDLYLVTRHADVIPVRRRGDSRGSLLSPRPVSYLKGSSGGPLLCPSGHAVGIFRAAVCTRGVAKAVDFVPVESMETTMR

SEQ ID NO: 131 - protein, 180 aa, Artificial Sequence
  synthetic polypeptide
APITAYAQQTRGLLGTIVVSMTGRDKTEQAGEIQVLSTVTQSFLGTSISGVLWTVYHGAGNKTLAGSRGPVTQMYSSAEGDLVGWPSPPGTKSLEPCTCGAVDLYLVTRNADVIPARRRGDKRGALLSPRPLSTLKGSSGGPVLCPRGHAVGVFRAAVCSRGVAKSIDFIPVETLDIVTR

SEQ ID NO: 132 - protein, 180 aa, Artificial Sequence
  synthetic polypeptide
APITAYAQQTRGLLGTIVTSLTGRDKNVVTGEVQVLSTATQTFLGTTVGGVIWTVYHGAGSRTLAGAKHPALQMYTNVDQDLVGWPAPPGAKSLEPCACGSSDLYLVTRDADVIPARRRGDSTASLLSPRPLACLKGSSGGPVMCPSGHVAGIFRAAVCTRGVAKSLQFIPVETLSTQAR

SEQ ID NO: 133 - protein, 180 aa, Artificial Sequence
  synthetic polypeptide
APITAYAQQTRGLFSTIVTSLTGRDTNENCGEVQVLSTATQSFLGTAVNGVMWTVYHGAGAKTISGPKGPVNQMYTNVDQDLVGWPAPPGVRSLAPCTCGSADLYLVTRHADVIPVRRRGDTRGALLSPRPISILKGSSGGPLLCPMGHRAGIFRAAVCTRGVAKAVDFVPVESLETTMR

SEQ ID NO: 134 - protein, 180 aa, Artificial Sequence
  synthetic polypeptide
APITAYAQQTRGVLGAIVLSLTGRDKNEAEGEVQFLSTATQTFLGICINGVMWTLFHGAGSKTLAGPKGPVVQMYTNVDKDLVGWPSPPGKGSLTRCTCGSADLYLVTRHADVIPARRRGDTRASLLSPRPISYLKGSSGGPIMCPSGHVVGVFRAAVCTRGVAKALEFVPVENLETTMR

SEQ ID NO: 135 - protein, 180 aa, Artificial Sequence
  synthetic polypeptide
APITAYAQQTRGLVGTIVTSLTGRDKNEAEGEVQVVSTATQSFLATTINGVLWTVYHGAGSKNLAGPKGPVCQMYTNVDQDLVGWPAPLGARSLAPCTCGSSDLYLVTRGADVIPARRRGDTRAALLSPRPISTLKGSSGGPLMCPSGHVVGLFRAAVCTRGVAKALDFIPVENMDTTMR

SEQ ID NO: 136 - protein, 180 aa, Artificial Sequence
  synthetic polypeptide
APISAYAQQTRGLISTLVVSLTGRDKNETAGEVQVLSTSTQTFLGTNVGGVMWGPYHGAGTRTVAGRGGPVLQMYTSVSDDLVGWPAPPGSKSLEPCSCGSADLYLVTRNADVLPLRRKGDGTASLLSPRPVSSLKGSSGGPVLCPQSHCVGIFRAAVCTRGVAKAVQFVPIEKMQVAQR

SEQ ID NO: 137 - protein, 14 aa, Artificial Sequence
  synthetic polypeptide
GCVVIVGRIVLSGK

SEQ ID NO: 138 - protein, 14 aa, Artificial Sequence
  synthetic polypeptide
GCVCIIGRLHINQR

SEQ ID NO: 139 - protein, 14 aa, Artificial Sequence
  synthetic polypeptide
GCVVIVGHIELEGK

SEQ ID NO: 140 - protein, 14 aa, Artificial Sequence
  synthetic polypeptide
GSVVIVGRVVLSGQ

SEQ ID NO: 141 - protein, 14 aa, Artificial Sequence
  synthetic polypeptide
GSVAIVGRIILSGR

SEQ ID NO: 142 - protein, 14 aa, Artificial Sequence
  synthetic polypeptide
GCVVICGRIVTSGK

SEQ ID NO: 143 - protein, 14 aa, Artificial Sequence
  synthetic polypeptide
GSVVVVGRVVLGSN

SEQ ID NO: 144 - protein, 54 aa, Artificial Sequence
  synthetic polypeptide
STWVLVGGVLAALAAYCLSTGCVVIVGRIVLSGKPAIIPDREVLYQEFDEMEEC

SEQ ID NO: 145 - protein, 54 aa, Artificial Sequence
  synthetic polypeptide
STWVLVGGVLAALAAYCLSTGCVVIVGRVVLSGKPAIIPDREVLYREFDEMEEC

SEQ ID NO: 146 - protein, 54 aa, Artificial Sequence
  synthetic polypeptide
STWVLVGGVLAALAAYCLSTGCVVIVGRIVLSGRPAIIPDREVLYREFDEMEEC

SEQ ID NO: 147 - protein, 54 aa, Artificial Sequence
  synthetic polypeptide
STWVLVGGVLAALAAYCLTTGSVVIVGRIILSGRPAIVPDRELLYQEFDEMEEC

SEQ ID NO: 148 - protein, 54 aa, Artificial Sequence
  synthetic polypeptide
STWVLVGGVLAALAAYCLTTGSVVIVGRIILSGRPAIIPDRELLYQEFDEMEEC

SEQ ID NO: 149 - protein, 54 aa, Artificial Sequence
  synthetic polypeptide
STWVLVGGVLAALAAYCLTTGSVVIVGRIILSGKPAVVPDRELLYQEFDEMEEC

SEQ ID NO: 150 - protein, 54 aa, Artificial Sequence
  synthetic polypeptide
STWVLVGGVLAALAAYCLTTGSVVIVGRIILSGRPAVIPDRELLYREFDEMEEC

SEQ ID NO: 151 - protein, 54 aa, Artificial Sequence
  synthetic polypeptide
STWVLAGGVLAAVAAYCLATGCVCIIGRLHVNQRAVVAPDKEVLYEAFDEMEEC

SEQ ID NO: 152 - protein, 54 aa, Artificial Sequence
  synthetic polypeptide
STWVLAGGVLAAVAAYCLATGCVSIIGRLHINGRAVVAPDKEVLYEAFDEMEEC

SEQ ID NO: 153 - protein, 54 aa, Artificial Sequence
  synthetic polypeptide
SSWVLAGGVLAAVAAYCLATGCISIIGRLHLNDRVVVAPDKEILYEAFDEMEEC

SEQ ID NO: 154 - protein, 54 aa, Artificial Sequence
  synthetic polypeptide
STWVLAGGVLAAVAAYCLATGCVSIIGRLHLNDQVVVTPDKEILYEAFDEMEEC

SEQ ID NO: 155 - protein, 54 aa, Artificial Sequence
  synthetic polypeptide
STWVLLGGVLAALAAYCLSVGCVVIVGHIELEGKPALVPDKEVLYQQYDEMEEC

SEQ ID NO: 156 - protein, 54 aa, Artificial Sequence
  synthetic polypeptide
STWVLLGGVLAAVAAYCLSVGCVVIVGHIELGGKPALVPDKEVLYQQYDEMEEC

SEQ ID NO: 157 - protein, 4 aa, Artificial Sequence
  synthetic polypeptide
SGTS

SEQ ID NO: 158 - protein, 4 aa, Artificial Sequence
  synthetic polypeptide
GSGS

SEQ ID NO: 159 - protein, 20 aa, Artificial Sequence
  synthetic polypeptide
CMSADLEVVTSTWVLVGGVL

SEQ ID NO: 160 - protein, 20 aa, Artificial Sequence
  synthetic polypeptide
CMSADLEVVTSTWVLVGGVL

SEQ ID NO: 161 - protein, 20 aa, Artificial Sequence
  synthetic polypeptide
CMQADLEVMTSTWVLAGGVL

SEQ ID NO: 162 - protein, 20 aa, Artificial Sequence
  synthetic polypeptide
CMQADLEIMTSSWVLAGGVL

SEQ ID NO: 163 - protein, 20 aa, Artificial Sequence
  synthetic polypeptide
CMSADLEVTTSTWVLLGGVL

SEQ ID NO: 164 - protein, 20 aa, Artificial Sequence
  synthetic polypeptide
YQEFDEMEECSQHLPYIEQG

SEQ ID NO: 165 - protein, 20 aa, Artificial Sequence
  synthetic polypeptide
YQEFDEMEECASHLPYIEQG

SEQ ID NO: 166 - protein, 20 aa, Artificial Sequence
  synthetic polypeptide
YEAFDEMEECASRAALIEEG

SEQ ID NO: 167 - protein, 20 aa, Artificial Sequence
  synthetic polypeptide
YEAFDEMEECASKAALIEEG

SEQ ID NO: 168 - protein, 20 aa, Artificial Sequence
  synthetic polypeptide
YQQYDEMEECSQAAPYIEQA

SEQ ID NO: 169 - protein, 20 aa, Artificial Sequence
  synthetic polypeptide
WISSECTTPCSGSWLRDVWD

SEQ ID NO: 170 - protein, 20 aa, Artificial Sequence
  synthetic polypeptide
WINEDCSTPCSGSWLRDVWD

SEQ ID NO: 171 - protein, 20 aa, Artificial Sequence
  synthetic polypeptide
WITEDCPIPCSGSWLRDVWD

SEQ ID NO: 172 - protein, 20 aa, Artificial Sequence
  synthetic polypeptide
WITEDCPVPCSGSWLQDIWD

SEQ ID NO: 173 - protein, 20 aa, Artificial Sequence
  synthetic polypeptide
WINEDYPSPCSDDWLRTIWD

SEQ ID NO: 174 - protein, 20 aa, Artificial Sequence
  synthetic polypeptide
GADTEDVVCCSMSYSWTGAL

SEQ ID NO: 175 - protein, 20 aa, Artificial Sequence
  synthetic polypeptide
EEASEDVVCCSMSYTWTGAL

SEQ ID NO: 176 - protein, 20 aa, Artificial Sequence
  synthetic polypeptide
SEEDDSVVCCSMSYSWTGAL

SEQ ID NO: 177 - protein, 20 aa, Artificial Sequence
  synthetic polypeptide
SDQEDSVICCSMSYSWTGAL

SEQ ID NO: 178 - protein, 20 aa, Artificial Sequence
  synthetic polypeptide
DSEEQSVVCCSMSYSWTGAL

SEQ ID NO: 179 - protein, 180 aa, Artificial Sequence
  synthetic polypeptide
APITAYAQQTRGLLGCIITSLTGRDKNQVEGEVQIVSTATQTFLATCINGVCWTVYHGAGTRTIASPKGPVIQMYTNVDQDLVGWPAPQGSRSLTPCTCGSSDLYLVTRHADVIPVRRRGDSRGSLLSPRPISYLKGSSGGPLLCPAGHAVGLFRAAVCTRGVTKAVDFIPVENLETTMR

SEQ ID NO: 180 - protein, 180 aa, Artificial Sequence
  synthetic polypeptide
APITAYSQQTRGLLGCIITSLTGRDKNQVEGEVQVVSTATQSFLATCVNGVCWTVYHGAGSKTLAAPKGPITQMYTNVDQDLVGWPKPPGARSLTPCTCGSSDLYLVTRHADVIPVRRRGDSRGSLLSPRPVSYLKGSSGGPLLCPFGHAVGIFRAAVCTRGVAKAVDFVPVESMETTMR

SEQ ID NO: 181 - protein, 180 aa, Artificial Sequence
  synthetic polypeptide
APITAYAQQTRGLLGTIVVSMTGRDKTEQAGEIQVLSTVTQSFLGTTISGVLWTVYHGAGNKTLAGSRGPVTQMYSSAEGDLVGWPSPPGTKSLEPCTCGAVDLYLVTRNADVIPARRRGDKRGALLSPRPLSTLKGSSGGPVLCPRGHAVGVFRAAVCSRGVAKSIDFIPVETLDIVTR

SEQ ID NO: 182 - protein, 180 aa, Artificial Sequence
  synthetic polypeptide
APITAYTQQTRGLLGAIVVSLTGRDKNEQAGQVQVLSSVTQTFLGTSISGVLWTVYHGAGNKTLAGPKGPVTQMYTSAEGDLVGWPSPPGTKSLDPCTCGAVDLYLVTRNADVIPVRRKDDRRGALLSPRPLSTLKGSSGGPVLCSRGHAVGLFRAAVCARGVAKSIDFIPVESLDVATR

SEQ ID NO: 183 - protein, 180 aa, Artificial Sequence; identical to SEQ ID NO: 132
  synthetic polypeptide

SEQ ID NO: 184 - protein, 182 aa, Artificial Sequence
  synthetic polypeptide
MAPITAYAQQTRGLLGCIITSLTGRDKNQVEGEVQIVSTAAQTFLATCINGVCWTVYHGAGTRTIASPKGPVIQMYTNVDKDLVGWPAPQGSRSLTPCTCGSSDLYLVTRHADVIPVRRRGDSRGSLLSPRPISYLKGSSGGPLLCPAGHAVGIFRAAVCTRGVAKAVDFIPVESLETTMRS

SEQ ID NO: 185 - protein, 195 aa, Artificial Sequence
  synthetic polypeptide
MKKKGSVVIVGRIVLNGAYAQQTRGLLGCIITSLTGRDKNQVEGEVQIVSTAAQTFLATCINGVCWTVYHGAGTRTIASPKGPVIQMYTNVDKDLVGWPAPQGSRSLTPCTCGSSDLYLVTRHADVIPVRRRGDSRGSLLSPRPISYLKGSSGGPLLCPAGHAVGIFRAAVCTRGVAKAVDFIPVESLETTMRSP

SEQ ID NO: 186 - protein, 195 aa, Artificial Sequence
  synthetic polypeptide
MKKKGSVVIVGRIVLNGAYAQQTRGEEGCQETSQTGRDKNQVEGEVQIVSTAAQTFLATCINGVCWTVYHGAGTRTIASPKGPVIQMYTNVDKDLVGWPAPQGSRSLTPCTCGSSDLYLVTRHADVIPVRRRGDSRGSLLSPRPISYLKGSSGGPLLCPAGHAVGIFRAAVCTRGVAKAVDFIPVESLETTMRSP

SEQ ID NO: 187 - protein, 197 aa, Artificial Sequence
  synthetic polypeptide
MKKKGSVVIVGRINLSGDTAYAQQTRGEEGCQETSQTGRDKNQVEGEVQIVSTAAQTFLATCINGVCWTVYHGAGTRTIASPKGPVIQMYTNVDKDLVGWPAPQGSRSLTPCTCGSSDLYLVTRHADVIPVRRRGDSRGSLLSPRPISYLKGSSGGPLLCPAGHAVGIFRAAVCTRGVAKAVDFIPVESLETTMRSP

SEQ ID NO: 188 - protein, 197 aa, Artificial Sequence
  synthetic polypeptide
MKKKGSVVIVGRINLSGDTAYAQQTRGEEGCQETSQTGRDKNQVEGEVQIVSTATQTFLATCINGVCWTVYHGAGTRTIASPKGPVTQMYTNVDKDLVGWQAPQGSRSLTPCTCGSSDLYLVTRHADVIPVRRRGDSRGSLLSPRPISYLKGSSGGPLLCPAGHAVGIFRAAVCTRGVAKAVDFIPVESLETTMRSP

SEQ ID NO: 189 - protein, 197 aa, Artificial Sequence
  synthetic polypeptide
MKKKGSVVIVGRINLSGDTAYAQQTRGEEGCQETSQTGRDKNQVEGEVQIVSTATQTFLATSINGVLWTVYHGAGTRTIASPKGPVTQMYTNVDKDLVGWQAPQGSRSLTPCTCGSSDLYLVTRHADVIPVRRRGDSRGSLLSPRPISYLKGSSGGPLLCPAGHAVGIFRAAVSTRGVAKAVDFIPVESLETTMRSP

SEQ ID NO: 190 - protein, 197 aa, Artificial Sequence
  synthetic polypeptide
MKKKGSVVIVGRINLSGDTAYAQQTRGEQGCQKTSHTGRDKNQVEGEVQIVSTATQTFLATSINGVLWTVYHGAGTRTIASPKGPVTQMYTNVDKDLVGWQAPQGSRSLTPCTCGSSDLYLVTRHADVIPVRRRGDSRGSLLSPRPISYLKGSSGGPLLCPAGHAVGIFRAAVSTRGVAKAVDFIPVESLETTMRSP

SEQ ID NO: 191 - protein, 197 aa, Artificial Sequence
  synthetic polypeptide
MKKKGSVVIVGRINLSGDTAYAQQTRGEQGTQKTSHTGRDKNQVEGEVQIVSTATQTFLATSINGVLWTVYHGAGTRTIASPKGPVTQMYTNVDKDLVGWQAPQGSRSLTPCTCGSSDLYLVTRHADVIPVRRRGDSRGSLLSPRPISYLKGSSGGPLLCPAGHAVGIFRAAVSTRGVAKAVDFIPVESLETTMRSP

SEQ ID NO: 192 - protein, 33 aa, Artificial Sequence
  synthetic polypeptide
GELGRLVYLLDGPGYDPIHCSLAYGDASTLVVF

SEQ ID NO: 193 - protein, 18 aa, Artificial Sequence
  synthetic polypeptide
GELGRLVYLLDGPGYDPI

SEQ ID NO: 194 - protein, 15 aa, Artificial Sequence
  synthetic polypeptide
HCSLAYGDASTLVVF

SEQ ID NO: 195 - protein, 33 aa, Artificial Sequence
  synthetic polypeptide
GELGRPVYVLGDPGYYATHCIYATTNDALIFSV

SEQ ID NO: 196 - protein, 18 aa, Artificial Sequence
  synthetic polypeptide
GELGRPVYVLGDPGYYAT

SEQ ID NO: 197 - protein, 15 aa, Artificial Sequence
  synthetic polypeptide
HCIYATTNDALIFSV

SEQ ID NO: 198 - protein, 33 aa, Artificial Sequence
  synthetic polypeptide
GELGRIPSDTYDLAVGALHCPFYLVSGLVYLDG

SEQ ID NO: 199 - protein, 33 aa, Artificial Sequence
  synthetic polypeptide
GELGRLVYLLDGPGYDPIHCDVVTRGGSHLFNF

SEQ ID NO: 200 - protein, 33 aa, Artificial Sequence; identical to SEQ ID NO: 95
  synthetic polypeptide

SEQ ID NO: 201 - protein, 21 aa, Artificial Sequence
  synthetic polypeptide
GELGRLVYLLDGPGYDPIHCD

SEQ ID NO: 202 - protein, 20 aa, Artificial Sequence
  synthetic polypeptide
GELDELVYLLDGPGYDPIHS

SEQ ID NO: 203 - protein, 36 aa, Artificial Sequence
  synthetic polypeptide
RQIKIWFQNRRMKWKKGELDELVYLLDGPGYDPIHS

SEQ ID NO: 204 - protein, 21 aa, Artificial Sequence
  synthetic polypeptide
GELDELVYLLDGPGYDPIHSD

SEQ ID NO: 205 - protein, 196 aa, Artificial Sequence
  synthetic polypeptide
KKKGSVVIVGRINLSGDTAYAQQTRGEEGCQETSQTGRDKNQVEGEVQIVSTATQTFLATSINGVLWTVYHGAGTRTIASPKGPVTQMYTNVDKDLVGWQAPQGSRSLTPCTCGSSDLYLVTRHADVIPVRRRGDSRGSLLSPRPISYLKGSAGGPLLCPAGHAVGIFRAAVSTRGVAKAVDFIPVESLETTMRSP

SEQ ID NO: 206 - protein, 229 aa, Artificial Sequence
  synthetic polypeptide
SSDEEEARELIERAKEAAERAQEAAERTGDPRVRELARELKRLAQEAAEEVKRDPSSSDVNEALKLIVEAIEAAVDALEAAERTGDPEVRELARELVRLAVEAAEEVQRNPSSSDVNEALLTIVIAIEAAVNALEAAERTGDPEVRELARELVRLAVEAAEEVQRNPSSREVNIALWKIVLAIQEAVESLREAEESGDPEKREKARERVREAVERAEEVQRDPSGWLNH

SEQ ID NO: 207 - protein, 229 aa, Artificial Sequence
  synthetic polypeptide
SSDEEEARELIERAKEAAERAQEAAERTGDPRVRELARELKRLAQEAAEEVKRDPSSSDVNEALKLIVEAIEAAVDALEAAERTGDPEVRELARELVRLAVEAAEEVQRNPSSSDVNEALLSIVIAIEAAVHALEAAERTGDPEVRELARELVRLAVEAAEEVQRNPSSREVEHALMKIVLAIYEAEESLREAEESGDPEKREKARERVREAVERAEEVQRDPSGWLNH

SEQ ID NO: 208 - protein, 233 aa, Artificial Sequence
  synthetic polypeptide
DIEKLCKKAEEEAKEAQEKADELRQRHPDSQAAEDAEDLANEAEAAVLAACSLAQEHPNADIAKLCIKAASEAAEAASKAAELAQRHPDSQAARDAIKLASQAARAVILAIMLAAENPNADIAKLCIKAASEAAEAASKAAELAQRHPDSQAARDAIKLASQAAEAVERAIWLAAENPNADIAKKCIKAASEAAEEASKAAEEAQRHPDSQKARDEIKEASQKAEEVKERCKS

SEQ ID NO: 209 - protein, 21 aa, Artificial Sequence
  synthetic polypeptide
GSGEGRGSLLTCGDVEENPGP

SEQ ID NO: 210 - protein, 22 aa, Artificial Sequence
  synthetic polypeptide
GSGATNFSLLKQAGDVEENPGP

SEQ ID NO: 211 - protein, 23 aa, Artificial Sequence
  synthetic polypeptide
GSGQCTNYALLKLAGDVESNPGP

SEQ ID NO: 212 - protein, 25 aa, Artificial Sequence
  synthetic polypeptide
GSGVKQTLNFDLLKLAGDVESNPGP

SEQ ID NO: 213 - DNA, 26 bp, Artificial Sequence
  synthetic oligonucleotide
ggttctgttgttattgttggtagaat

SEQ ID NO: 214 - DNA, 25 bp, Artificial Sequence
  synthetic oligonucleotide
ggtaataaccagactcagcagaagc

SEQ ID NO: 215 - DNA, 50 bp, Artificial Sequence
  synthetic oligonucleotide
gcttctgctgagtctggttattaccggttctgttgttattgttggtagaa

SEQ ID NO: 216 - DNA, 50 bp, Artificial Sequence
  synthetic oligonucleotide
ctgcgctcctgctgaacttcactctagaccgcatggtagtttccatagac

SEQ ID NO: 217 - DNA, 25 bp, Artificial Sequence
  synthetic oligonucleotide
agagtgaagttcagcaggagcgcag

SEQ ID NO: 218 - DNA, 46 bp, Artificial Sequence
  synthetic oligonucleotide
ctgcgctcctgctgaacttcactctggtaataaccagactcagcag

SEQ ID NO: 219 - DNA, 51 bp, Artificial Sequence
  synthetic oligonucleotide
attctaccaacaataacaacagaaccgcgagggggcagggcctgcatgtga

SEQ ID NO: 220 - DNA, 57 bp, Artificial Sequence
  synthetic oligonucleotide
atgttatcctcctcgcccttgctcaccatgccagaccgcatggtagtttccatagac

SEQ ID NO: 221 - DNA, 29 bp, Artificial Sequence
  synthetic oligonucleotide
atggtgagcaagggcgaggaggataacat

SEQ ID NO: 222 - DNA, 25 bp, Artificial Sequence
  synthetic oligonucleotide
ggagcgataggctgcgaagtcgcgt

SEQ ID NO: 223 - DNA, 55 bp, Artificial Sequence
  synthetic oligonucleotide
gcctgacccgctgaattcggtaccccccagttcacatcctccttcttcttcttct

SEQ ID NO: 224 - DNA, 25 bp, Artificial Sequence
  synthetic oligonucleotide
ggctcaggaagctcttccgacgaag

SEQ ID NO: 225 - DNA, 50 bp, Artificial Sequence
  synthetic oligonucleotide
cttcgtcggaagagcttcctgagccggagcgataggctgcgaagtcgcgt

SEQ ID NO: 226 - DNA, 25 bp, Artificial Sequence
  synthetic oligonucleotide
atgattcagccaaccggatggatca

SEQ ID NO: 227 - DNA, 50 bp, Artificial Sequence
  synthetic oligonucleotide
tgatccatccggttggctgaatcatggcagtggagagggcagaggaagtc

SEQ ID NO: 228 - DNA, 50 bp, Artificial Sequence
  synthetic oligonucleotide
gcttctcgatatcgcttcctgagccggagcgataggctgcgaagtcgcgt

SEQ ID NO: 229 - DNA, 25 bp, Artificial Sequence
  synthetic oligonucleotide
ggctcaggaagcgatatcgagaagc

SEQ ID NO: 230 - DNA, 25 bp, Artificial Sequence
  synthetic oligonucleotide
ggacttacagcgttcttttacctcc

SEQ ID NO: 231 - DNA, 50 bp, Artificial Sequence
  synthetic oligonucleotide
ggaggtaaaagaacgctgtaagtccggcagtggagagggcagaggaagtc

SEQ ID NO: 232 - DNA, 25 bp, Artificial Sequence
  synthetic oligonucleotide
ggctgcgtggtcatagtgggcagga

SEQ ID NO: 233 - DNA, 25 bp, Artificial Sequence
  synthetic oligonucleotide
cagttcacatcctccttcttcttct

SEQ ID NO: 234 - DNA, 50 bp, Artificial Sequence
  synthetic oligonucleotide
tcctgcccactatgaccacgcagcccagttcacatcctccttcttcttct

SEQ ID NO: 235 - DNA, 25 bp, Artificial Sequence
  synthetic oligonucleotide
agagtgaagttcagcaggagcgcag

SEQ ID NO: 236 - DNA, 10600 bp, Artificial Sequence
  synthetic vector
cgataccgtcgacctcgagggaattaattcgagctcggtacctttaagaccaatgacttacaaggcagctgtagatcttagccactttttaaaagaaaaggggggactggaagggctaattcactcccaacgaagacaagatctgctttttgcttgtactgggtctctctggttagaccagatctgagcctgggagctctctggctaactagggaacccactgcttaagcctcaataaagcttgccttgagtgcttcaagtagtgtgtgcccgtctgttgtgtgactctggtaactagagatccctcagacccttttagtcagtgtggaaaatctctagcagcatctagaattaattccgtgtattctatagtgtcacctaaatcgtatgtgtatgatacataaggttatgtattaattgtagccgcgttctaacgacaatatgtacaagcctaattgtgtagcatctggcttactgaagcagaccctatcatctctctcgtaaactgccgtcagagtcggtttggttggacgaaccttctgagtttctggtaacgccgtcccgcacccggaaatggtcagcgaaccaatcagcagggtcatcgctagccagatcctctacgccggacgcatcgtggccggcatcaccggcgccacaggtgcggttgctggcgcctatatcgccgacatcaccgatggggaagatcgggctcgccacttcgggctcatgagcgcttgtttcggcgtgggtatggtggcaggccccgtggccgggggactgttgggcgccatctccttgcatgcaccattccttgcggcggcggtgctcaacggcctcaacctactactgggctgcttcctaatgcaggagtcgcataagggagagcgtcgaatggtgcactctcagtacaatctgctctgatgccgcatagttaagccagccccgacacccgccaacacccgctgacgcgccctgacgggcttgtctgctcccggcatccgcttacagacaagctgtgaccgtctccgggagctgcatgtgtcagaggttttcaccgtcatcaccgaaacgcgcgagacgaaagggcctcgtgatacgcctatttttataggttaatgtcatgataataatggtttcttagacgtcaggtggcacttttcggggaaatgtgcgcggaacccctatttgtttatttttctaaatacattcaaatatgtatccgctcatgagacaataaccctgataaatgcttcaataatattgaaaaaggaagagtatgagtattcaacatttccgtgtcgcccttattcccttttttgcggcattttgccttcctgtttttgctcacccagaaacgctggtgaaagtaaaagatgctgaagatcagttgggtgcacgagtgggttacatcgaactggatctcaacagcggtaagatccttgagagttttcgccccgaagaacgttttccaatgatgagcacttttaaagttctgctatgtggcgcggtattatcccgtattgacgccgggcaagagcaactcggtcgccgcatacactattctcagaatgacttggttgagtactcaccagtcacagaaaagcatcttacggatggcatgacagtaagagaattatgcagtgctgccataaccatgagtgataacactgcggccaacttacttctgacaacgatcggaggaccgaaggagctaaccgcttttttgcacaacatgggggatcatgtaactcgccttgatcgttgggaaccggagctgaatgaagccataccaaacgacgagcgtgacaccacgatgcctgtagcaatggcaacaacgttgcgcaaactattaactggcgaactacttactctagcttcccggcaacaattaatagactggatggaggcggataaagttgcaggaccacttctgcgctcggcccttccggctggctggtttattgctgataaatctggagccggtgagcgtgggtctcgcggtatcattgcagcactggggccagatggtaagccctcccgtatcgtagttatctacacgacggggagtcaggcaactatggatgaacgaaatagacagatcgctgagataggtgcctcactgattaagcattggtaactgtcagaccaagtttactcatatatactttagattgatttaaaacttcatttttaatttaaaaggatctaggtgaagatcctttttgataatctcatgaccaaaatcccttaacgtgagttttcgttccactgagcgtcagaccccgtagaaaagatcaaaggatcttcttgagatcctttttttctgcgcgtaatctgctgcttgcaaacaaaaaaaccaccgctaccagcggtggtttgtttgccggatcaagagctaccaactctttttccgaaggtaactggcttcagcagagcgcagataccaaatactgtctttctagtgtagccgtagttaggccaccacttcaagaactctgtagcaccgcctacatacctcgctctgctaatcctgttaccagtggctgctgccagtggcgataagtcgtgtcttaccgggttggactcaagacgatagttaccggataaggcgcagcggtcgggctgaacggggggttcgtgcacacagcccagcttggagcgaacgacctacaccgaactgagatacctacagcgtgagctatgagaaagcgccacgcttcccgaagggagaaaggcggacaggtatccggtaagcggcagggtcggaacaggagagcgcacgagggagcttccagggggaaacgcctggtatctttatagtcctgtcgggtttcgccacctctgacttgagcgtcgatttttgtgatgctcgtcaggggggcggagcctatggaaaaacgccagcaacgcggcctttttacggttcctggccttttgctggccttttgctcacatgttctttcctgcgttatcccctgattctgtggataaccgtattaccgcctttgagtgagctgataccgctcgccgcagccgaacgaccgagcgcagcgagtcagtgagcgaggaagcggaagagcgcccaatacgcaaaccgcctctccccgcgcgttggccgattcattaatgcagctgtggaatgtgtgtcagttagggtgtggaaagtccccaggctccccagcaggcagaagtatgcaaagcatgcatctcaattagtcagcaaccaggtgtggaaagtccccaggctccccagcaggcagaagtatgcaaagcatgcatctcaattagtcagcaaccatagtcccgcccctaactccgcccatcccgcccctaactccgcccagttccgcccattctccgccccatggctgactaattttttttatttatgcagaggccgaggccgcctcggcctctgagctattccagaagtagtgaggaggcttttttggaggcctaggcttttgcaaaaagcttggacacaagacaggcttgcgagatatgtttgagaataccactttatcccgcgtcagggagaggcagtgcgtaaaaagacgcggactcatgtgaaatactggtttttagtgcgccagatctctataatctcgcgcaacctattttcccctcgaacactttttaagccgtagataaacaggctgggacacttcacatgagcgaaaaatacatcgtcacctgggacatgttgcagatccatgcacgtaaactcgcaagccgactgatgccttctgaacaatggaaaggcattattgccgtaagccgtggcggtctgtaccgggtgcgttactggcgcgtgaactgggtattcgtcatgtcgataccgtttgtatttccagctacgatcacgacaaccagcgcgagcttaaagtgctgaaacgcgcagaaggcgatggcgaaggcttcatcgttattgatgacctggtggataccggtggtactgcggttgcgattcgtgaaatgtatccaaaagcgcactttgtcaccatcttcgcaaaaccggctggtcgtccgctggttgatgactatgttgttgatatcccgcaagatacctggattgaacagccgtgggatatgggcgtcgtattcgtcccgccaatctccggtcgctaatcttttcaacgcctggcactgccgggcgttgttctttttaacttcaggcgggttacaatagtttccagtaagtattctggaggctgcatccatgacacaggcaaacctgagcgaaaccctgttcaaaccccgctttaaacatcctgaaacctcgacgctagtccgccgctttaatcacggcgcacaaccgcctgtgcagtcggcccttgatggtaaaaccatccctcactggtatcgcatgattaaccgtctgatgtggatctggcgcggcattgacccacgcgaaatcctcgacgtccaggcacgtattgtgatgagcgatgccgaacgtaccgacgatgatttatacgatacggtgattggctaccgtggcggcaactggatttatgagtgggccccggatctttgtgaaggaaccttacttctgtggtgtgacataattggacaaactacctacagagatttaaagctctaaggtaaatataaaatttttaagtgtataatgtgttaaactactgattctaattgtttgtgtattttagattccaacctatggaactgatgaatgggagcagtggtggaatgcctttaatgaggaaaacctgttttgctcagaagaaatgccatctagtgatgatgaggctactgctgactctcaacattctactcctccaaaaaagaagagaaaggtagaagaccccaaggactttccttcagaattgctaagttttttgagtcatgctgtgtttagtaatagaactcttgcttgctttgctatttacaccacaaaggaaaaagctgcactgctatacaagaaaattatggaaaaatattctgtaacctttataagtaggcataacagttataatcataacatactgttttttcttactccacacaggcatagagtgtctgctattaataactatgctcaaaaattgtgtacctttagctttttaatttgtaaaggggttaataaggaatatttgatgtatagtgccttgactagagatcataatcagccataccacatttgtagaggttttacttgctttaaaaaacctcccacacctccccctgaacctgaaacataaaatgaatgcaattgttgttgttaacttgtttattgcagcttataatggttacaaataaagcaatagcatcacaaatttcacaaataaagcatttttttcactgcattctagttgtggtttgtccaaactcatcaatgtatcttatcatgtctggatcaactggataactcaagctaaccaaaatcatcccaaacttcccaccccataccctattaccactgccaattacctagtggtttcatttactctaaacctgtgattcctctgaattattttcattttaaagaaattgtatttgttaaatatgtactacaaacttagtagttggaagggctaattcactcccaaagaagacaagatatccttgatctgtggatctaccacacacaaggctacttccctgattagcagaactacacaccagggccaggggtcagatatccactgacctttggatggtgctacaagctagtaccagttgagccagataaggtagaagaggccaataaaggagagaacaccagcttgttacaccctgtgagcctgcatgggatggatgacccggagagagaagtgttagagtggaggtttgacagccgcctagcatttcatcacgtggcccgagagctgcatccggagtacttcaagaactgctgatatcgagcttgctacaagggactttccgctggggactttccagggaggcgtggcctgggcgggactggggagtggcgagccctcagatcctgcatataagcagctgctttttgcctgtactgggtctctctggttagaccagatctgagcctgggagctctctggctaactagggaacccactgcttaagcctcaataaagcttgccttgagtgcttcaagtagtgtgtgcccgtctgttgtgtgactctggtaactagagatccctcagacccttttagtcagtgtggaaaatctctagcagtggcgcccgaacagggacttgaaagcgaaagggaaaccagaggagctctctcgacgcaggactcggcttgctgaagcgcgcacggcaagaggcgaggggcggcgactggtgagtacgccaaaaattttgactagcggaggctagaaggagagagatgggtgcgagagcgtcagtattaagcgggggagaattagatcgcgatgggaaaaaattcggttaaggccagggggaaagaaaaaatataaattaaaacatatagtatgggcaagcagggagctagaacgattcgcagttaatcctggcctgttagaaacatcagaaggctgtagacaaatactgggacagctacaaccatcccttcagacaggatcagaagaacttagatcattatataatacagtagcaaccctctattgtgtgcatcaaaggatagagataaaagacaccaaggaagctttagacaagatagaggaagagcaaaacaaaagtaagaccaccgcacagcaagcggccggccgctgatcttcagacctggaggaggagatatgagggacaattggagaagtgaattatataaatataaagtagtaaaaattgaaccattaggagtagcacccaccaaggcaaagagaagagtggtgcagagagaaaaaagagcagtgggaataggagctttgttccttgggttcttgggagcagcaggaagcactatgggcgcagcgtcaatgacgctgacggtacaggccagacaattattgtctggtatagtgcagcagcagaacaatttgctgagggctattgaggcgcaacagcatctgttgcaactcacagtctggggcatcaagcagctccaggcaagaatcctggctgtgaaagatacctaaaggatcaacagctcctggggatttggggttgctctggaaaactcatttgcaccactgctgtgccttggaatgctagttggagtaataaatctctggaacagatttggaatcacacgacctggatggagtgggacagagaaattaacaattacacaagcttaatacactccttaattgaagaatcgcaaaaccagcaagaaaagaatgaacaagaattattggaattagataaatgggcaagtttgtggaattggtttaacataacaaattggctgtggtatataaaattattcataatgatagtaggaggcttggtaggtttaagaatagtttttgctgtactttctatagtgaatagagttaggcagggatattcaccattatcgtttcagacccacctcccaaccccgaggggacccgacaggcccgaaggaatagaagaagaaggtggagagagagacagagacagatccattcgattagtgaacggatctcgacggtatcgccaaatggcagtattcatccacaattttaaaagaaaaggggggattggggggtacagtgcaggggaaagaatagtagacataatagcaacagacatacaaactaaagaattacaaaaacaaattacaaaaattcaaaattttcgggtttattacagggacagcagagatccagtttggatcgataagcttgatatcgaattcctgcagccccgataaaataaaagattttatttagtctccagaaaaaggggggaatgaaagaccccacctgtaggtttggcaagctagctgcagtaacgccattttgcaaggcatggaaaaataccaaaccaagaatagagaagttcagatcaagggcgggtacatgaaaatagctaacgttgggccaaacaggatatctgcggtgagcagtttcggccccggcccggggccaagaacagatggtcaccgcagtttcggccccggcccgaggccaagaacagatggtccccagatatggcccaaccctcagcagtttcttaagacccatcagatgtttccaggctcccccaaggacctgaaatgaccctgcgccttatttgaattaaccaatcagcctgcttctcgcttctgttcgcgcgcttctgcttcccgagctctataaaagagctcacaacccctcactcggcgcgccagtcctccgacagactgagtcgcccgggggggatctggagctctcgagaattctcacgcgtgccgccaccatggccctgcctgtgacagctctgctgctgcctctggccctgctgctgcatgctgctagacctcaggtgcagctgcaggaaagcggccctggcctcgtgaagcctagcgagacactgagcctgacctgcaccgtgtccggctacagcatcaccagcaactactggggctggatcagacagccccctggcaagggcctggaatggatgggctacatcacctacagcggcagcaccagctacaaccccagcctgaagtcccggatcaccatcagccgggacaccagcaagaaccagttctccctgaagctgagcagcgtgacagccgccgataccgccgtgtactactgcgccatcaccaccttctactattggggccagggcaccctcgtgaccgtgtctagcggaggcggaggatctggcggcggaggaagtggcggagggggctctgatatccagatgacccagagccccagcagcctgtctgccagcgtgggcgacagagtgaccatcacctgtagagccagccaggacatcggcaactacctgcggtggttccagcagaagccaggcaaggcccccaagctgctgatctccggcgccacaaatctggccgctggcgtgccaagcagattcagcggctctggcagcggctccgacttcaccctgaccatctctagcctgcagcccgaggacttcgccacctactactgcctgcagagcaaagagagcccctggaccttcggacagggcaccaaggtggaaatcaagcggacagaacaaaaactcatctcagaagaagatctgaatggggccgcaaccacgacgccagcgccgcgaccaccaacaccggcgcccaccatcgcgttgcagcccctgtccctgcgcccagaggcgtgccggccagcggcggggggcgcagtgcacacgagggggctggacttcgcctgtgatttttgggtgctggtggtggttggtggagtcctggcttgctatagcttgctagtaacagtggcctttattattttctgggtgaggagtaagaggagcaggctcctgcacagtgactacatgaacatgactccccgccgccccgggcccacccgcaagcattaccagccctatgccccaccacgcgacttcgcagcctatcgctccggcatcagtctgattgcggcgttagcggtagattacgttatcggcatggaaaacgccatgccgtggaacctgcctgccgatctcgcctggtttaaacgcaacaccttaaataaacccgtgattatgggccgccatacctgggaatcaatcggtcgtccgttgccaggacgcaaaaatattatcctcagcagtcaaccgagtacggacgatcgcgtaacgtgggtgaagtcggtggatgaagccatcgcggcgtgtggtgacgtaccagaaatcatggtgattggcggcggtcgcgttattgaacagttcttgccaaaagcgcaaaaactgtatctgacgcatatcgacgcagaagtggaaggcgacacccatttcccggattacgagccggatgactgggaatcggtattcagcgagttccacgatgctgatgcgcagaactctcacagctattgctttgagattctggagcggcgataagcggccgcgactctagagtcgacctgcaggcatgcaagcttgatatcaagcttatcgataatcaacctctggattacaaaatttgtgaaagattgactggtattcttaactatgttgctccttttacgctatgtggatacgctgctttaatgcctttgtatcatgctattgcttcccgtatggctttcattttctcctccttgtataaatcctggttgctgtctctttatgaggagttgtggcccgttgtcaggcaacgtggcgtggtgtgcactgtgtttgctgacgcaacccccactggttggggcattgccaccacctgtcagctcctttccgggactttcgctttccccctccctattgccacggcggaactcatcgccgcctgccttgcccgctgctggacaggggctcggctgttgggcactgacaattccgtggtgttgtcggggaaatcatcgtcctttccttggctgctcgcctgtgttgccacctggattctgcgcgggacgtccttctgctacgtcccttcggccctcaatccagcggaccttccttcccgcggcctgctgccggctctgcggcctcttccgcgtcttcgccttcgccctcagacgagtcggatctccctttgggccgcctccccgcat

SEQ ID NO: 237 - DNA, 11293 bp, Artificial Sequence
  synthetic vector
cgataccgtcgacctcgagggaattaattcgagctcggtacctttaagaccaatgacttacaaggcagctgtagatcttagccactttttaaaagaaaaggggggactggaagggctaattcactcccaacgaagacaagatctgctttttgcttgtactgggtctctctggttagaccagatctgagcctgggagctctctggctaactagggaacccactgcttaagcctcaataaagcttgccttgagtgcttcaagtagtgtgtgcccgtctgttgtgtgactctggtaactagagatccctcagacccttttagtcagtgtggaaaatctctagcagcatctagaattaattccgtgtattctatagtgtcacctaaatcgtatgtgtatgatacataaggttatgtattaattgtagccgcgttctaacgacaatatgtacaagcctaattgtgtagcatctggcttactgaagcagaccctatcatctctctcgtaaactgccgtcagagtcggtttggttggacgaaccttctgagtttctggtaacgccgtcccgcacccggaaatggtcagcgaaccaatcagcagggtcatcgctagccagatcctctacgccggacgcatcgtggccggcatcaccggcgccacaggtgcggttgctggcgcctatatcgccgacatcaccgatggggaagatcgggctcgccacttcgggctcatgagcgcttgtttcggcgtgggtatggtggcaggccccgtggccgggggactgttgggcgccatctccttgcatgcaccattccttgcggcggcggtgctcaacggcctcaacctactactgggctgcttcctaatgcaggagtcgcataagggagagcgtcgaatggtgcactctcagtacaatctgctctgatgccgcatagttaagccagccccgacacccgccaacacccgctgacgcgccctgacgggcttgtctgctcccggcatccgcttacagacaagctgtgaccgtctccgggagctgcatgtgtcagaggttttcaccgtcatcaccgaaacgcgcgagacgaaagggcctcgtgatacgcctatttttataggttaatgtcatgataataatggtttcttagacgtcaggtggcacttttcggggaaatgtgcgcggaacccctatttgtttatttttctaaatacattcaaatatgtatccgctcatgagacaataaccctgataaatgcttcaataatattgaaaaaggaagagtatgagtattcaacatttccgtgtcgcccttattcccttttttgcggcattttgccttcctgtttttgctcacccagaaacgctggtgaaagtaaaagatgctgaagatcagttgggtgcacgagtgggttacatcgaactggatctcaacagcggtaagatccttgagagttttcgccccgaagaacgttttccaatgatgagcacttttaaagttctgctatgtggcgcggtattatcccgtattgacgccgggcaagagcaactcggtcgccgcatacactattctcagaatgacttggttgagtactcaccagtcacagaaaagcatcttacggatggcatgacagtaagagaattatgcagtgctgccataaccatgagtgataacactgcggccaacttacttctgacaacgatcggaggaccgaaggagctaaccgcttttttgcacaacatgggggatcatgtaactcgccttgatcgttgggaaccggagctgaatgaagccataccaaacgacgagcgtgacaccacgatgcctgtagcaatggcaacaacgttgcgcaaactattaactggcgaactacttactctagcttcccggcaacaattaatagactggatggaggcggataaagttgcaggaccacttctgcgctcggcccttccggctggctggtttattgctgataaatctggagccggtgagcgtgggtctcgcggtatcattgcagcactggggccagatggtaagccctcccgtatcgtagttatctacacgacggggagtcaggcaactatggatgaacgaaatagacagatcgctgagataggtgcctcactgattaagcattggtaactgtcagaccaagtttactcatatatactttagattgatttaaaacttcatttttaatttaaaaggatctaggtgaagatcctttttgataatctcatgaccaaaatcccttaacgtgagttttcgttccactgagcgtcagaccccgtagaaaagatcaaaggatcttcttgagatcctttttttctgcgcgtaatctgctgcttgcaaacaaaaaaaccaccgctaccagcggtggtttgtttgccggatcaagagctaccaactctttttccgaaggtaactggcttcagcagagcgcagataccaaatactgtctttctagtgtagccgtagttaggccaccacttcaagaactctgtagcaccgcctacatacctcgctctgctaatcctgttaccagtggctgctgccagtggcgataagtcgtgtcttaccgggttggactcaagacgatagttaccggataaggcgcagcggtcgggctgaacggggggttcgtgcacacagcccagcttggagcgaacgacctacaccgaactgagatacctacagcgtgagctatgagaaagcgccacgcttcccgaagggagaaaggcggacaggtatccggtaagcggcagggtcggaacaggagagcgcacgagggagcttccagggggaaacgcctggtatctttatagtcctgtcgggtttcgccacctctgacttgagcgtcgatttttgtgatgctcgtcaggggggcggagcctatggaaaaacgccagcaacgcggcctttttacggttcctggccttttgctggccttttgctcacatgttctttcctgcgttatcccctgattctgtggataaccgtattaccgcctttgagtgagctgataccgctcgccgcagccgaacgaccgagcgcagcgagtcagtgagcgaggaagcggaagagcgcccaatacgcaaaccgcctctccccgcgcgttggccgattcattaatgcagctgtggaatgtgtgtcagttagggtgtggaaagtccccaggctccccagcaggcagaagtatgcaaagcatgcatctcaattagtcagcaaccaggtgtggaaagtccccaggctccccagcaggcagaagtatgcaaagcatgcatctcaattagtcagcaaccatagtcccgcccctaactccgcccatcccgcccctaactccgcccagttccgcccattctccgccccatggctgactaattttttttatttatgcagaggccgaggccgcctcggcctctgagctattccagaagtagtgaggaggcttttttggaggcctaggcttttgcaaaaagcttggacacaagacaggcttgcgagatatgtttgagaataccactttatcccgcgtcagggagaggcagtgcgtaaaaagacgcggactcatgtgaaatactggtttttagtgcgccagatctctataatctcgcgcaacctattttcccctcgaacactttttaagccgtagataaacaggctgggacacttcacatgagcgaaaaatacatcgtcacctgggacatgttgcagatccatgcacgtaaactcgcaagccgactgatgccttctgaacaatggaaaggcattattgccgtaagccgtggcggtctgtaccgggtgcgttactggcgcgtgaactgggtattcgtcatgtcgataccgtttgtatttccagctacgatcacgacaaccagcgcgagcttaaagtgctgaaacgcgcagaaggcgatggcgaaggcttcatcgttattgatgacctggtggataccggtggtactgcggttgcgattcgtgaaatgtatccaaaagcgcactttgtcaccatcttcgcaaaaccggctggtcgtccgctggttgatgactatgttgttgatatcccgcaagatacctggattgaacagccgtgggatatgggcgtcgtattcgtcccgccaatctccggtcgctaatcttttcaacgcctggcactgccgggcgttgttctttttaacttcaggcgggttacaatagtttccagtaagtattctggaggctgcatccatgacacaggcaaacctgagcgaaaccctgttcaaaccccgctttaaacatcctgaaacctcgacgctagtccgccgctttaatcacggcgcacaaccgcctgtgcagtcggcccttgatggtaaaaccatccctcactggtatcgcatgattaaccgtctgatgtggatctggcgcggcattgacccacgcgaaatcctcgacgtccaggcacgtattgtgatgagcgatgccgaacgtaccgacgatgatttatacgatacggtgattggctaccgtggcggcaactggatttatgagtgggccccggatctttgtgaaggaaccttacttctgtggtgtgacataattggacaaactacctacagagatttaaagctctaaggtaaatataaaatttttaagtgtataatgtgttaaactactgattctaattgtttgtgtattttagattccaacctatggaactgatgaatgggagcagtggtggaatgcctttaatgaggaaaacctgttttgctcagaagaaatgccatctagtgatgatgaggctactgctgactctcaacattctactcctccaaaaaagaagagaaaggtagaagaccccaaggactttccttcagaattgctaagttttttgagtcatgctgtgtttagtaatagaactcttgcttgctttgctatttacaccacaaaggaaaaagctgcactgctatacaagaaaattatggaaaaatattctgtaacctttataagtaggcataacagttataatcataacatactgttttttcttactccacacaggcatagagtgtctgctattaataactatgctcaaaaattgtgtacctttagctttttaatttgtaaaggggttaataaggaatatttgatgtatagtgccttgactagagatcataatcagccataccacatttgtagaggttttacttgctttaaaaaacctcccacacctccccctgaacctgaaacataaaatgaatgcaattgttgttgttaacttgtttattgcagcttataatggttacaaataaagcaatagcatcacaaatttcacaaataaagcatttttttcactgcattctagttgtggtttgtccaaactcatcaatgtatcttatcatgtctggatcaactggataactcaagctaaccaaaatcatcccaaacttcccaccccataccctattaccactgccaattacctagtggtttcatttactctaaacctgtgattcctctgaattattttcattttaaagaaattgtatttgttaaatatgtactacaaacttagtagttggaagggctaattcactcccaaagaagacaagatatccttgatctgtggatctaccacacacaaggctacttccctgattagcagaactacacaccagggccaggggtcagatatccactgacctttggatggtgctacaagctagtaccagttgagccagataaggtagaagaggccaataaaggagagaacaccagcttgttacaccctgtgagcctgcatgggatggatgacccggagagagaagtgttagagtggaggtttgacagccgcctagcatttcatcacgtggcccgagagctgcatccggagtacttcaagaactgctgatatcgagcttgctacaagggactttccgctggggactttccagggaggcgtggcctgggcgggactggggagtggcgagccctcagatcctgcatataagcagctgctttttgcctgtactgggtctctctggttagaccagatctgagcctgggagctctctggctaactagggaacccactgcttaagcctcaataaagcttgccttgagtgcttcaagtagtgtgtgcccgtctgttgtgtgactctggtaactagagatccctcagacccttttagtcagtgtggaaaatctctagcagtggcgcccgaacagggacttgaaagcgaaagggaaaccagaggagctctctcgacgcaggactcggcttgctgaagcgcgcacggcaagaggcgaggggcggcgactggtgagtacgccaaaaattttgactagcggaggctagaaggagagagatgggtgcgagagcgtcagtattaagcgggggagaattagatcgcgatgggaaaaaattcggttaaggccagggggaaagaaaaaatataaattaaaacatatagtatgggcaagcagggagctagaacgattcgcagttaatcctggcctgttagaaacatcagaaggctgtagacaaatactgggacagctacaaccatcccttcagacaggatcagaagaacttagatcattatataatacagtagcaaccctctattgtgtgcatcaaaggatagagataaaagacaccaaggaagctttagacaagatagaggaagagcaaaacaaaagtaagaccaccgcacagcaagcggccggccgctgatcttcagacctggaggaggagatatgagggacaattggagaagtgaattatataaatataaagtagtaaaaattgaaccattaggagtagcacccaccaaggcaaagagaagagtggtgcagagagaaaaaagagcagtgggaataggagctttgttccttgggttcttgggagcagcaggaagcactatgggcgcagcgtcaatgacgctgacggtacaggccagacaattattgtctggtatagtgcagcagcagaacaatttgctgagggctattgaggcgcaacagcatctgttgcaactcacagtctggggcatcaagcagctccaggcaagaatcctggctgtgaaagatacctaaaggatcaacagctcctggggatttggggttgctctggaaaactcatttgcaccactgctgtgccttggaatgctagttggagtaataaatctctggaacagatttggaatcacacgacctggatggagtgggacagagaaattaacaattacacaagcttaatacactccttaattgaagaatcgcaaaaccagcaagaaaagaatgaacaagaattattggaattagataaatgggcaagtttgtggaattggtttaacataacaaattggctgtggtatataaaattattcataatgatagtaggaggcttggtaggtttaagaatagtttttgctgtactttctatagtgaatagagttaggcagggatattcaccattatcgtttcagacccacctcccaaccccgaggggacccgacaggcccgaaggaatagaagaagaaggtggagagagagacagagacagatccattcgattagtgaacggatctcgacggtatcgccaaatggcagtattcatccacaattttaaaagaaaaggggggattggggggtacagtgcaggggaaagaatagtagacataatagcaacagacatacaaactaaagaattacaaaaacaaattacaaaaattcaaaattttcgggtttattacagggacagcagagatccagtttggatcgataagcttgatatcgaattcctgcagccccgataaaataaaagattttatttagtctccagaaaaaggggggaatgaaagaccccacctgtaggtttggcaagctagctgcagtaacgccattttgcaaggcatggaaaaataccaaaccaagaatagagaagttcagatcaagggcgggtacatgaaaatagctaacgttgggccaaacaggatatctgcggtgagcagtttcggccccggcccggggccaagaacagatggtcaccgcagtttcggccccggcccgaggccaagaacagatggtccccagatatggcccaaccctcagcagtttcttaagacccatcagatgtttccaggctcccccaaggacctgaaatgaccctgcgccttatttgaattaaccaatcagcctgcttctcgcttctgttcgcgcgcttctgcttcccgagctctataaaagagctcacaacccctcactcggcgcgccagtcctccgacagactgagtcgcccgggggggatctggagctctcgagaattctcacgcgtgccgccaccatggccttaccagtgaccgccttgctcctgccgctggccttgctgctccacgccgccaggccgaaatacctattgcctacggcagccgctggattgttattactcgcggcccagccggccatggcccaggtgcagctggtgcagtctggggcagaggtgaaaaagcccggggagtctctgaagatctcctgtaagggttctggatacagctttaccagctactggatcgcctgggtgcgccagatgcccgggaaaggcctggagtacatggggctcatctatcctggtgactctgacaccaaatacagcccgtccttccaaggccaggtcaccatctcagtcgacaagtccgtcagcactgcctacttgcaatggagcagtctgaagccctcggacagcgccgtgtatttttgtgcgagacatgacgtgggatattgcaccgaccggacttgcgcaaagtggcctgaatacttccagcattggggccagggcaccctggtcaccgtctcctcaggtggaggcggttcaggcggaggtggctctggcggtggcggatcgcagtctgtgttgacgcagccgccctcagtgtctgcggccccaggacagaaggtcaccatctcctgctctggaagcagctccaacattgggaataattatgtatcctggtaccagcagctcccaggaacagcccccaaactcctcatctatgatcacaccaatcggcccgcaggggtccctgaccgattctctggctccaagtctggcacctcagcctccctggccatcagtgggttccggtccgaggatgaggctgattattactgtgcctcctgggactacaccctctcgggctgggtgttcggcggagggaccaagctgaccgtcctaggtgggaagcctatcccgaaccctctgttgggtctcgatagtaccaatggggccgcaaccacgacgccagcgccgcgaccaccaacaccggcgcccaccatcgcgttgcagcccctgtccctgcgcccagaggcgtgccggccagcggcggggggcgcagtgcacacgagggggctggacttcgcctgtgatttttgggtgctggtggtggttggtggagtcctggcttgctatagcttgctagtaacagtggcctttattattttctgggtggaggacgtggtgtgctgccactcaatctacggcaagaagaagggtgatatcgacacctaccgatacataggctcttccgggacaggctgcgtggtcatagtgggcaggatcgtcttgtccggatccggcactagtgcgcccatcacggcgtacgcccagcagacgagaggcctcctagggtgtataatcaccagcctgactggccgggacaaaaaccaagtggagggtgaggtccagatcgtgtcaactgctacccaaaccttcctggcaacgtgcatcaatggggtatgctgggcagtctaccacggggccggaacgaggaccatcgcatcacccaagggtcctgtcatccagatgtataccaatgtggaccaagaccttgtgggctggcccgctcctcaaggttcccgctcattgacaccctgtacctgcggctcctcggacctttacctggtcacgaggcacgccgatgtcattcccgtgcgccggcgaggtgatagcaggggtagcctgctttcgccccggcccatttcctacttgaaaggctcctcggggggtccgctgttgtgccccgcgggacacgccgtgggcctattcagggccgcggtgtgcacccgtggagtggctaaagcggtggactttatccctgtggagaacctagagacaaccatgagatccccggtgttcacggacaactcctctccaccagcagtcaccctgacgcacccaatcaccaaaatcgatagggaggttctctaccaggagttcgatgagatggaagagtgctctcagcactatccctacgatgtgcccgattacgctagagtgaagttcagcaggagcgcagacgcccccgcgtacaagcagggccagaaccagctctataacgagctcaatctaggacgaagagaggagtacgatgttttggacaagagacgtggccgggaccctgagatggggggaaagccgagaaggaagaaccctcaggaaggcctgtacaatgaactgcagaaagataagatggcggaggcctacagtgagattgggatgaaaggcgagcgccggaggggcaaggggcacgatggcctttaccagggtctcagtacagccaccaaggacacctacgacgcccttcacatgcaggccctgccccctcgctaaactagtgcggccgcgactctagagtcgacctgcaggcatgcaagcttgatatcaagcttatcgataatcaacctctggattacaaaatttgtgaaagattgactggtattcttaactatgttgctccttttacgctatgtggatacgctgctttaatgcctttgtatcatgctattgcttcccgtatggctttcattttctcctccttgtataaatcctggttgctgtctctttatgaggagttgtggcccgttgtcaggcaacgtggcgtggtgtgcactgtgtttgctgacgcaacccccactggttggggcattgccaccacctgtcagctcctttccgggactttcgctttccccctccctattgccacggcggaactcatcgccgcctgccttgcccgctgctggacaggggctcggctgttgggcactgacaattccgtggtgttgtcggggaaatcatcgtcctttccttggctgctcgcctgtgttgccacctggattctgcgcgggacgtccttctgctacgtcccttcggccctcaatccagcggaccttccttcccgcggcctgctgccggctctgcggcctcttccgcgtcttcgccttcgccctcagacgagtcggatctccctttgggccgcctccccgcat

SEQ ID NO: 238 - DNA, 10986 bp, Artificial Sequence
  synthetic vector
cgataccgtcgacctcgagggaattaattcgagctcggtacctttaagaccaatgacttacaaggcagctgtagatcttagccactttttaaaagaaaaggggggactggaagggctaattcactcccaacgaagacaagatctgctttttgcttgtactgggtctctctggttagaccagatctgagcctgggagctctctggctaactagggaacccactgcttaagcctcaataaagcttgccttgagtgcttcaagtagtgtgtgcccgtctgttgtgtgactctggtaactagagatccctcagacccttttagtcagtgtggaaaatctctagcagcatctagaattaattccgtgtattctatagtgtcacctaaatcgtatgtgtatgatacataaggttatgtattaattgtagccgcgttctaacgacaatatgtacaagcctaattgtgtagcatctggcttactgaagcagaccctatcatctctctcgtaaactgccgtcagagtcggtttggttggacgaaccttctgagtttctggtaacgccgtcccgcacccggaaatggtcagcgaaccaatcagcagggtcatcgctagccagatcctctacgccggacgcatcgtggccggcatcaccggcgccacaggtgcggttgctggcgcctatatcgccgacatcaccgatggggaagatcgggctcgccacttcgggctcatgagcgcttgtttcggcgtgggtatggtggcaggccccgtggccgggggactgttgggcgccatctccttgcatgcaccattccttgcggcggcggtgctcaacggcctcaacctactactgggctgcttcctaatgcaggagtcgcataagggagagcgtcgaatggtgcactctcagtacaatctgctctgatgccgcatagttaagccagccccgacacccgccaacacccgctgacgcgccctgacgggcttgtctgctcccggcatccgcttacagacaagctgtgaccgtctccgggagctgcatgtgtcagaggttttcaccgtcatcaccgaaacgcgcgagacgaaagggcctcgtgatacgcctatttttataggttaatgtcatgataataatggtttcttagacgtcaggtggcacttttcggggaaatgtgcgcggaacccctatttgtttatttttctaaatacattcaaatatgtatccgctcatgagacaataaccctgataaatgcttcaataatattgaaaaaggaagagtatgagtattcaacatttccgtgtcgcccttattcccttttttgcggcattttgccttcctgtttttgctcacccagaaacgctggtgaaagtaaaagatgctgaagatcagttgggtgcacgagtgggttacatcgaactggatctcaacagcggtaagatccttgagagttttcgccccgaagaacgttttccaatgatgagcacttttaaagttctgctatgtggcgcggtattatcccgtattgacgccgggcaagagcaactcggtcgccgcatacactattctcagaatgacttggttgagtactcaccagtcacagaaaagcatcttacggatggcatgacagtaagagaattatgcagtgctgccataaccatgagtgataacactgcggccaacttacttctgacaacgatcggaggaccgaaggagctaaccgcttttttgcacaacatgggggatcatgtaactcgccttgatcgttgggaaccggagctgaatgaagccataccaaacgacgagcgtgacaccacgatgcctgtagcaatggcaacaacgttgcgcaaactattaactggcgaactacttactctagcttcccggcaacaattaatagactggatggaggcggataaagttgcaggaccacttctgcgctcggcccttccggctggctggtttattgctgataaatctggagccggtgagcgtgggtctcgcggtatcattgcagcactggggccagatggtaagccctcccgtatcgtagttatctacacgacggggagtcaggcaactatggatgaacgaaatagacagatcgctgagataggtgcctcactgattaagcattggtaactgtcagaccaagtttactcatatatactttagattgatttaaaacttcatttttaatttaaaaggatctaggtgaagatcctttttgataatctcatgaccaaaatcccttaacgtgagttttcgttccactgagcgtcagaccccgtagaaaagatcaaaggatcttcttgagatcctttttttctgcgcgtaatctgctgcttgcaaacaaaaaaaccaccgctaccagcggtggtttgtttgccggatcaagagctaccaactctttttccgaaggtaactggcttcagcagagcgcagataccaaatactgtctttctagtgtagccgtagttaggccaccacttcaagaactctgtagcaccgcctacatacctcgctctgctaatcctgttaccagtggctgctgccagtggcgataagtcgtgtcttaccgggttggactcaagacgatagttaccggataaggcgcagcggtcgggctgaacggggggttcgtgcacacagcccagcttggagcgaacgacctacaccgaactgagatacctacagcgtgagctatgagaaagcgccacgcttcccgaagggagaaaggcggacaggtatccggtaagcggcagggtcggaacaggagagcgcacgagggagcttccagggggaaacgcctggtatctttatagtcctgtcgggtttcgccacctctgacttgagcgtcgatttttgtgatgctcgtcaggggggcggagcctatggaaaaacgccagcaacgcggcctttttacggttcctggccttttgctggccttttgctcacatgttctttcctgcgttatcccctgattctgtggataaccgtattaccgcctttgagtgagctgataccgctcgccgcagccgaacgaccgagcgcagcgagtcagtgagcgaggaagcggaagagcgcccaatacgcaaaccgcctctccccgcgcgttggccgattcattaatgcagctgtggaatgtgtgtcagttagggtgtggaaagtccccaggctccccagcaggcagaagtatgcaaagcatgcatctcaattagtcagcaaccaggtgtggaaagtccccaggctccccagcaggcagaagtatgcaaagcatgcatctcaattagtcagcaaccatagtcccgcccctaactccgcccatcccgcccctaactccgcccagttccgcccattctccgccccatggctgactaattttttttatttatgcagaggccgaggccgcctcggcctctgagctattccagaagtagtgaggaggcttttttggaggcctaggcttttgcaaaaagcttggacacaagacaggcttgcgagatatgtttgagaataccactttatcccgcgtcagggagaggcagtgcgtaaaaagacgcggactcatgtgaaatactggtttttagtgcgccagatctctataatctcgcgcaacctattttcccctcgaacactttttaagccgtagataaacaggctgggacacttcacatgagcgaaaaatacatcgtcacctgggacatgttgcagatccatgcacgtaaactcgcaagccgactgatgccttctgaacaatggaaaggcattattgccgtaagccgtggcggtctgtaccgggtgcgttactggcgcgtgaactgggtattcgtcatgtcgataccgtttgtatttccagctacgatcacgacaaccagcgcgagcttaaagtgctgaaacgcgcagaaggcgatggcgaaggcttcatcgttattgatgacctggtggataccggtggtactgcggttgcgattcgtgaaatgtatccaaaagcgcactttgtcaccatcttcgcaaaaccggctggtcgtccgctggttgatgactatgttgttgatatcccgcaagatacctggattgaacagccgtgggatatgggcgtcgtattcgtcccgccaatctccggtcgctaatcttttcaacgcctggcactgccgggcgttgttctttttaacttcaggcgggttacaatagtttccagtaagtattctggaggctgcatccatgacacaggcaaacctgagcgaaaccctgttcaaaccccgctttaaacatcctgaaacctcgacgctagtccgccgctttaatcacggcgcacaaccgcctgtgcagtcggcccttgatggtaaaaccatccctcactggtatcgcatgattaaccgtctgatgtggatctggcgcggcattgacccacgcgaaatcctcgacgtccaggcacgtattgtgatgagcgatgccgaacgtaccgacgatgatttatacgatacggtgattggctaccgtggcggcaactggatttatgagtgggccccggatctttgtgaaggaaccttacttctgtggtgtgacataattggacaaactacctacagagatttaaagctctaaggtaaatataaaatttttaagtgtataatgtgttaaactactgattctaattgtttgtgtattttagattccaacctatggaactgatgaatgggagcagtggtggaatgcctttaatgaggaaaacctgttttgctcagaagaaatgccatctagtgatgatgaggctactgctgactctcaacattctactcctccaaaaaagaagagaaaggtagaagaccccaaggactttccttcagaattgctaagttttttgagtcatgctgtgtttagtaatagaactcttgcttgctttgctatttacaccacaaaggaaaaagctgcactgctatacaagaaaattatggaaaaatattctgtaacctttataagtaggcataacagttataatcataacatactgttttttcttactccacacaggcatagagtgtctgctattaataactatgctcaaaaattgtgtacctttagctttttaatttgtaaaggggttaataaggaatatttgatgtatagtgccttgactagagatcataatcagccataccacatttgtagaggttttacttgctttaaaaaacctcccacacctccccctgaacctgaaacataaaatgaatgcaattgttgttgttaacttgtttattgcagcttataatggttacaaataaagcaatagcatcacaaatttcacaaataaagcatttttttcactgcattctagttgtggtttgtccaaactcatcaatgtatcttatcatgtctggatcaactggataactcaagctaaccaaaatcatcccaaacttcccaccccataccctattaccactgccaattacctagtggtttcatttactctaaacctgtgattcctctgaattattttcattttaaagaaattgtatttgttaaatatgtactacaaacttagtagttggaagggctaattcactcccaaagaagacaagatatccttgatctgtggatctaccacacacaaggctacttccctgattagcagaactacacaccagggccaggggtcagatatccactgacctttggatggtgctacaagctagtaccagttgagccagataaggtagaagaggccaataaaggagagaacaccagcttgttacaccctgtgagcctgcatgggatggatgacccggagagagaagtgttagagtggaggtttgacagccgcctagcatttcatcacgtggcccgagagctgcatccggagtacttcaagaactgctgatatcgagcttgctacaagggactttccgctggggactttccagggaggcgtggcctgggcgggactggggagtggcgagccctcagatcctgcatataagcagctgctttttgcctgtactgggtctctctggttagaccagatctgagcctgggagctctctggctaactagggaacccactgcttaagcctcaataaagcttgccttgagtgcttcaagtagtgtgtgcccgtctgttgtgtgactctggtaactagagatccctcagacccttttagtcagtgtggaaaatctctagcagtggcgcccgaacagggacttgaaagcgaaagggaaaccagaggagctctctcgacgcaggactcggcttgctgaagcgcgcacggcaagaggcgaggggcggcgactggtgagtacgccaaaaattttgactagcggaggctagaaggagagagatgggtgcgagagcgtcagtattaagcgggggagaattagatcgcgatgggaaaaaattcggttaaggccagggggaaagaaaaaatataaattaaaacatatagtatgggcaagcagggagctagaacgattcgcagttaatcctggcctgttagaaacatcagaaggctgtagacaaatactgggacagctacaaccatcccttcagacaggatcagaagaacttagatcattatataatacagtagcaaccctctattgtgtgcatcaaaggatagagataaaagacaccaaggaagctttagacaagatagaggaagagcaaaacaaaagtaagaccaccgcacagcaagcggccggccgctgatcttcagacctggaggaggagatatgagggacaattggagaagtgaattatataaatataaagtagtaaaaattgaaccattaggagtagcacccaccaaggcaaagagaagagtggtgcagagagaaaaaagagcagtgggaataggagctttgttccttgggttcttgggagcagcaggaagcactatgggcgcagcgtcaatgacgctgacggtacaggccagacaattattgtctggtatagtgcagcagcagaacaatttgctgagggctattgaggcgcaacagcatctgttgcaactcacagtctggggcatcaagcagctccaggcaagaatcctggctgtgaaagatacctaaaggatcaacagctcctggggatttggggttgctctggaaaactcatttgcaccactgctgtgccttggaatgctagttggagtaataaatctctggaacagatttggaatcacacgacctggatggagtgggacagagaaattaacaattacacaagcttaatacactccttaattgaagaatcgcaaaaccagcaagaaaagaatgaacaagaattattggaattagataaatgggcaagtttgtggaattggtttaacataacaaattggctgtggtatataaaattattcataatgatagtaggaggcttggtaggtttaagaatagtttttgctgtactttctatagtgaatagagttaggcagggatattcaccattatcgtttcagacccacctcccaaccccgaggggacccgacaggcccgaaggaatagaagaagaaggtggagagagagacagagacagatccattcgattagtgaacggatctcgacggtatcgccaaatggcagtattcatccacaattttaaaagaaaaggggggattggggggtacagtgcaggggaaagaatagtagacataatagcaacagacatacaaactaaagaattacaaaaacaaattacaaaaattcaaaattttcgggtttattacagggacagcagagatccagtttggatcgataagcttgatatcgaattcctgcagcccgtgaggctccggtgcccgtcagtgggcagagcgcacatcgcccacagtccccgagaagttggggggaggggtcggcaattgaaccggtgcctagagaaggtggcgcggggtaaactgggaaagtgatgtcgtgtactggctccgcctttttcccgagggtgggggagaaccgtatataagtgcagtagtcgccgtgaacgttctttttcgcaacgggtttgccgccagaacacaggtaagtgccgtgtgtggttcccgcgggcctggcctctttacgggttatggcccttgcgtgccttgaattacttccacctggctgcagtacgtgattcttgatcccgagcttcgggttggaagtgggtgggagagttcgaggccttgcgcttaaggagccccttcgcctcgtgcttgagttgaggcctggcctgggcgctggggccgccgcgtgcgaatctggtggcaccttcgcgcctgtctcgctgctttcgataagtctctagccatttaaaatttttgatgacctgctgcgacgctttttttctggcaagatagtcttgtaaatgcgggccaagatctgcacactggtatttcggtttttggggccgcgggcggcgacggggcccgtgcgtcccagcgcacatgttcggcgaggcggggcctgcgagcgcggccaccgagaatcggacgggggtagtctcaagctggccggcctgctctggtgcctggcctcgcgccgccgtgtatcgccccgccctgggcggcaaggctggcccggtcggcaccagttgcgtgagcggaaagatggccgcttcccggccctgctgcagggagctcaaaatggaggacgcggcgctcgggagagcgggcgggtgagtcacccacacaaaggaaaagggcctttccgtcctcagccgtcgcttcatgtgactccacggagtaccgggcgccgtccaggcacctcgattagttctcgagcttttggagtacgtcgtctttaggttggggggaggggttttatgcgatggagtttccccacactgagtgggtggagactgaagttaggccagcttggcacttgatgtaattctccttggaatttgccctttttgagtttggatcttggttcattctcaagcctcagacagtggttcaaagtttttttcttccatttcaggtgtcgtgaggggatctggagctctcgagaattctcacgcgtgccgccaccatggccttaccagtgaccgccttgctcctgccgctggccttgctgctccacgccgccaggccggacatccagatgacacagactacatcctccctgtctgcctctctgggagacagagtcaccatcagttgcagggcaagtcaggacattagtaaatatttaaattggtatcagcagaaaccagatggaactgttaaactcctgatctaccatacatcaagattacactcaggagtcccatcaaggttcagtggcagtgggtctggaacagattattctctcaccattagcaacctggagcaagaagatattgccacttacttttgccaacagggtaatacgcttccgtacacgttcggaggcggcaccaagctggagatcacaggtggcggtggctcgggcggtggtgggtcgggtggcggcggatctgaggtgaaactgcaggagtcaggacctggcctggtggcgccctcacagagcctgtccgtcacatgcactgtctcaggggtctcattacccgactatggtgtaagctggattcgccagcctccacgaaagggtctggagtggctgggagtaatatggggtagtgaaaccacatactataattcagctctcaaatccagactgaccatcatcaaggacaactccaagagccaagttttcttaaaaatgaacagtctgcaaactgatgacacagccatttactactgtgccaaacattattactacggtggtagctatgctatggactactggggccaaggaacctcagtcaccgtctcctcagggaagcctatcccgaaccctctgttgggtctcgatagtaccaatggggccgcaaccacgacgccagcgccgcgaccaccaacaccggcgcccaccatcgcgttgcagcccctgtccctgcgcccagaggcgtgccggccagcggcggggggcgcagtgcacacgagggggctggacttcgcctgtgatttttgggtgctggtggtggttggtggagtcctggcttgctatagcttgctagtaacagtggcctttattattttctgggtgaggagtaagaggagcaggctcctgcacagtgactacatgaacatgactccccgccgccccgggcccacccgcaagcattaccagccctatgccccaccacgcgacttcgcagcctatcgctccgggggtaccgaattcagcgggtcaggcggatctggaagtggtggtggagaacttgatgaattggtatacttactagatgggccaggttatgaccctatacattgcgatgtagtgacaaggggcggcagccaccttttcaatttttaagcggccgcgactctagagtcgacctgcaggcatgcaagcttgatatcaagcttatcgataatcaacctctggattacaaaatttgtgaaagattgactggtattcttaactatgttgctccttttacgctatgtggatacgctgctttaatgcctttgtatcatgctattgcttcccgtatggctttcattttctcctccttgtataaatcctggttgctgtctctttatgaggagttgtggcccgttgtcaggcaacgtggcgtggtgtgcactgtgtttgctgacgcaacccccactggttggggcattgccaccacctgtcagctcctttccgggactttcgctttccccctccctattgccacggcggaactcatcgccgcctgccttgcccgctgctggacaggggctcggctgttgggcactgacaattccgtggtgttgtcggggaaatcatcgtcctttccttggctgctcgcctgtgttgccacctggattctgcgcgggacgtccttctgctacgtcccttcggccctcaatccagcggaccttccttcccgcggcctgctgccggctctgcggcctcttccgcgtcttcgccttcgccctcagacgagtcggatctccctttgggccgcctccccgcat

SEQ ID NO: 239 - DNA, 11112 bp, Artificial Sequence
  synthetic vector
cgataccgtcgacctcgagggaattaattcgagctcggtacctttaagaccaatgacttacaaggcagctgtagatcttagccactttttaaaagaaaaggggggactggaagggctaattcactcccaacgaagacaagatctgctttttgcttgtactgggtctctctggttagaccagatctgagcctgggagctctctggctaactagggaacccactgcttaagcctcaataaagcttgccttgagtgcttcaagtagtgtgtgcccgtctgttgtgtgactctggtaactagagatccctcagacccttttagtcagtgtggaaaatctctagcagcatctagaattaattccgtgtattctatagtgtcacctaaatcgtatgtgtatgatacataaggttatgtattaattgtagccgcgttctaacgacaatatgtacaagcctaattgtgtagcatctggcttactgaagcagaccctatcatctctctcgtaaactgccgtcagagtcggtttggttggacgaaccttctgagtttctggtaacgccgtcccgcacccggaaatggtcagcgaaccaatcagcagggtcatcgctagccagatcctctacgccggacgcatcgtggccggcatcaccggcgccacaggtgcggttgctggcgcctatatcgccgacatcaccgatggggaagatcgggctcgccacttcgggctcatgagcgcttgtttcggcgtgggtatggtggcaggccccgtggccgggggactgttgggcgccatctccttgcatgcaccattccttgcggcggcggtgctcaacggcctcaacctactactgggctgcttcctaatgcaggagtcgcataagggagagcgtcgaatggtgcactctcagtacaatctgctctgatgccgcatagttaagccagccccgacacccgccaacacccgctgacgcgccctgacgggcttgtctgctcccggcatccgcttacagacaagctgtgaccgtctccgggagctgcatgtgtcagaggttttcaccgtcatcaccgaaacgcgcgagacgaaagggcctcgtgatacgcctatttttataggttaatgtcatgataataatggtttcttagacgtcaggtggcacttttcggggaaatgtgcgcggaacccctatttgtttatttttctaaatacattcaaatatgtatccgctcatgagacaataaccctgataaatgcttcaataatattgaaaaaggaagagtatgagtattcaacatttccgtgtcgcccttattcccttttttgcggcattttgccttcctgtttttgctcacccagaaacgctggtgaaagtaaaagatgctgaagatcagttgggtgcacgagtgggttacatcgaactggatctcaacagcggtaagatccttgagagttttcgccccgaagaacgttttccaatgatgagcacttttaaagttctgctatgtggcgcggtattatcccgtattgacgccgggcaagagcaactcggtcgccgcatacactattctcagaatgacttggttgagtactcaccagtcacagaaaagcatcttacggatggcatgacagtaagagaattatgcagtgctgccataaccatgagtgataacactgcggccaacttacttctgacaacgatcggaggaccgaaggagctaaccgcttttttgcacaacatgggggatcatgtaactcgccttgatcgttgggaaccggagctgaatgaagccataccaaacgacgagcgtgacaccacgatgcctgtagcaatggcaacaacgttgcgcaaactattaactggcgaactacttactctagcttcccggcaacaattaatagactggatggaggcggataaagttgcaggaccacttctgcgctcggcccttccggctggctggtttattgctgataaatctggagccggtgagcgtgggtctcgcggtatcattgcagcactggggccagatggtaagccctcccgtatcgtagttatctacacgacggggagtcaggcaactatggatgaacgaaatagacagatcgctgagataggtgcctcactgattaagcattggtaactgtcagaccaagtttactcatatatactttagattgatttaaaacttcatttttaatttaaaaggatctaggtgaagatcctttttgataatctcatgaccaaaatcccttaacgtgagttttcgttccactgagcgtcagaccccgtagaaaagatcaaaggatcttcttgagatcctttttttctgcgcgtaatctgctgcttgcaaacaaaaaaaccaccgctaccagcggtggtttgtttgccggatcaagagctaccaactctttttccgaaggtaactggcttcagcagagcgcagataccaaatactgtctttctagtgtagccgtagttaggccaccacttcaagaactctgtagcaccgcctacatacctcgctctgctaatcctgttaccagtggctgctgccagtggcgataagtcgtgtcttaccgggttggactcaagacgatagttaccggataaggcgcagcggtcgggctgaacggggggttcgtgcacacagcccagcttggagcgaacgacctacaccgaactgagatacctacagcgtgagctatgagaaagcgccacgcttcccgaagggagaaaggcggacaggtatccggtaagcggcagggtcggaacaggagagcgcacgagggagcttccagggggaaacgcctggtatctttatagtcctgtcgggtttcgccacctctgacttgagcgtcgatttttgtgatgctcgtcaggggggcggagcctatggaaaaacgccagcaacgcggcctttttacggttcctggccttttgctggccttttgctcacatgttctttcctgcgttatcccctgattctgtggataaccgtattaccgcctttgagtgagctgataccgctcgccgcagccgaacgaccgagcgcagcgagtcagtgagcgaggaagcggaagagcgcccaatacgcaaaccgcctctccccgcgcgttggccgattcattaatgcagctgtggaatgtgtgtcagttagggtgtggaaagtccccaggctccccagcaggcagaagtatgcaaagcatgcatctcaattagtcagcaaccaggtgtggaaagtccccaggctccccagcaggcagaagtatgcaaagcatgcatctcaattagtcagcaaccatagtcccgcccctaactccgcccatcccgcccctaactccgcccagttccgcccattctccgccccatggctgactaattttttttatttatgcagaggccgaggccgcctcggcctctgagctattccagaagtagtgaggaggcttttttggaggcctaggcttttgcaaaaagcttggacacaagacaggcttgcgagatatgtttgagaataccactttatcccgcgtcagggagaggcagtgcgtaaaaagacgcggactcatgtgaaatactggtttttagtgcgccagatctctataatctcgcgcaacctattttcccctcgaacactttttaagccgtagataaacaggctgggacacttcacatgagcgaaaaatacatcgtcacctgggacatgttgcagatccatgcacgtaaactcgcaagccgactgatgccttctgaacaatggaaaggcattattgccgtaagccgtggcggtctgtaccgggtgcgttactggcgcgtgaactgggtattcgtcatgtcgataccgtttgtatttccagctacgatcacgacaaccagcgcgagcttaaagtgctgaaacgcgcagaaggcgatggcgaaggcttcatcgttattgatgacctggtggataccggtggtactgcggttgcgattcgtgaaatgtatccaaaagcgcactttgtcaccatcttcgcaaaaccggctggtcgtccgctggttgatgactatgttgttgatatcccgcaagatacctggattgaacagccgtgggatatgggcgtcgtattcgtcccgccaatctccggtcgctaatcttttcaacgcctggcactgccgggcgttgttctttttaacttcaggcgggttacaatagtttccagtaagtattctggaggctgcatccatgacacaggcaaacctgagcgaaaccctgttcaaaccccgctttaaacatcctgaaacctcgacgctagtccgccgctttaatcacggcgcacaaccgcctgtgcagtcggcccttgatggtaaaaccatccctcactggtatcgcatgattaaccgtctgatgtggatctggcgcggcattgacccacgcgaaatcctcgacgtccaggcacgtattgtgatgagcgatgccgaacgtaccgacgatgatttatacgatacggtgattggctaccgtggcggcaactggatttatgagtgggccccggatctttgtgaaggaaccttacttctgtggtgtgacataattggacaaactacctacagagatttaaagctctaaggtaaatataaaatttttaagtgtataatgtgttaaactactgattctaattgtttgtgtattttagattccaacctatggaactgatgaatgggagcagtggtggaatgcctttaatgaggaaaacctgttttgctcagaagaaatgccatctagtgatgatgaggctactgctgactctcaacattctactcctccaaaaaagaagagaaaggtagaagaccccaaggactttccttcagaattgctaagttttttgagtcatgctgtgtttagtaatagaactcttgcttgctttgctatttacaccacaaaggaaaaagctgcactgctatacaagaaaattatggaaaaatattctgtaacctttataagtaggcataacagttataatcataacatactgttttttcttactccacacaggcatagagtgtctgctattaataactatgctcaaaaattgtgtacctttagctttttaatttgtaaaggggttaataaggaatatttgatgtatagtgccttgactagagatcataatcagccataccacatttgtagaggttttacttgctttaaaaaacctcccacacctccccctgaacctgaaacataaaatgaatgcaattgttgttgttaacttgtttattgcagcttataatggttacaaataaagcaatagcatcacaaatttcacaaataaagcatttttttcactgcattctagttgtggtttgtccaaactcatcaatgtatcttatcatgtctggatcaactggataactcaagctaaccaaaatcatcccaaacttcccaccccataccctattaccactgccaattacctagtggtttcatttactctaaacctgtgattcctctgaattattttcattttaaagaaattgtatttgttaaatatgtactacaaacttagtagttggaagggctaattcactcccaaagaagacaagatatccttgatctgtggatctaccacacacaaggctacttccctgattagcagaactacacaccagggccaggggtcagatatccactgacctttggatggtgctacaagctagtaccagttgagccagataaggtagaagaggccaataaaggagagaacaccagcttgttacaccctgtgagcctgcatgggatggatgacccggagagagaagtgttagagtggaggtttgacagccgcctagcatttcatcacgtggcccgagagctgcatccggagtacttcaagaactgctgatatcgagcttgctacaagggactttccgctggggactttccagggaggcgtggcctgggcgggactggggagtggcgagccctcagatcctgcatataagcagctgctttttgcctgtactgggtctctctggttagaccagatctgagcctgggagctctctggctaactagggaacccactgcttaagcctcaataaagcttgccttgagtgcttcaagtagtgtgtgcccgtctgttgtgtgactctggtaactagagatccctcagacccttttagtcagtgtggaaaatctctagcagtggcgcccgaacagggacttgaaagcgaaagggaaaccagaggagctctctcgacgcaggactcggcttgctgaagcgcgcacggcaagaggcgaggggcggcgactggtgagtacgccaaaaattttgactagcggaggctagaaggagagagatgggtgcgagagcgtcagtattaagcgggggagaattagatcgcgatgggaaaaaattcggttaaggccagggggaaagaaaaaatataaattaaaacatatagtatgggcaagcagggagctagaacgattcgcagttaatcctggcctgttagaaacatcagaaggctgtagacaaatactgggacagctacaaccatcccttcagacaggatcagaagaacttagatcattatataatacagtagcaaccctctattgtgtgcatcaaaggatagagataaaagacaccaaggaagctttagacaagatagaggaagagcaaaacaaaagtaagaccaccgcacagcaagcggccggccgctgatcttcagacctggaggaggagatatgagggacaattggagaagtgaattatataaatataaagtagtaaaaattgaaccattaggagtagcacccaccaaggcaaagagaagagtggtgcagagagaaaaaagagcagtgggaataggagctttgttccttgggttcttgggagcagcaggaagcactatgggcgcagcgtcaatgacgctgacggtacaggccagacaattattgtctggtatagtgcagcagcagaacaatttgctgagggctattgaggcgcaacagcatctgttgcaactcacagtctggggcatcaagcagctccaggcaagaatcctggctgtgaaagatacctaaaggatcaacagctcctggggatttggggttgctctggaaaactcatttgcaccactgctgtgccttggaatgctagttggagtaataaatctctggaacagatttggaatcacacgacctggatggagtgggacagagaaattaacaattacacaagcttaatacactccttaattgaagaatcgcaaaaccagcaagaaaagaatgaacaagaattattggaattagataaatgggcaagtttgtggaattggtttaacataacaaattggctgtggtatataaaattattcataatgatagtaggaggcttggtaggtttaagaatagtttttgctgtactttctatagtgaatagagttaggcagggatattcaccattatcgtttcagacccacctcccaaccccgaggggacccgacaggcccgaaggaatagaagaagaaggtggagagagagacagagacagatccattcgattagtgaacggatctcgacggtatcgccaaatggcagtattcatccacaattttaaaagaaaaggggggattggggggtacagtgcaggggaaagaatagtagacataatagcaacagacatacaaactaaagaattacaaaaacaaattacaaaaattcaaaattttcgggtttattacagggacagcagagatccagtttggatcgataagcttgatatcgaattcctgcagcccgtgaggctccggtgcccgtcagtgggcagagcgcacatcgcccacagtccccgagaagttggggggaggggtcggcaattgaaccggtgcctagagaaggtggcgcggggtaaactgggaaagtgatgtcgtgtactggctccgcctttttcccgagggtgggggagaaccgtatataagtgcagtagtcgccgtgaacgttctttttcgcaacgggtttgccgccagaacacaggtaagtgccgtgtgtggttcccgcgggcctggcctctttacgggttatggcccttgcgtgccttgaattacttccacctggctgcagtacgtgattcttgatcccgagcttcgggttggaagtgggtgggagagttcgaggccttgcgcttaaggagccccttcgcctcgtgcttgagttgaggcctggcctgggcgctggggccgccgcgtgcgaatctggtggcaccttcgcgcctgtctcgctgctttcgataagtctctagccatttaaaatttttgatgacctgctgcgacgctttttttctggcaagatagtcttgtaaatgcgggccaagatctgcacactggtatttcggtttttggggccgcgggcggcgacggggcccgtgcgtcccagcgcacatgttcggcgaggcggggcctgcgagcgcggccaccgagaatcggacgggggtagtctcaagctggccggcctgctctggtgcctggcctcgcgccgccgtgtatcgccccgccctgggcggcaaggctggcccggtcggcaccagttgcgtgagcggaaagatggccgcttcccggccctgctgcagggagctcaaaatggaggacgcggcgctcgggagagcgggcgggtgagtcacccacacaaaggaaaagggcctttccgtcctcagccgtcgcttcatgtgactccacggagtaccgggcgccgtccaggcacctcgattagttctcgagcttttggagtacgtcgtctttaggttggggggaggggttttatgcgatggagtttccccacactgagtgggtggagactgaagttaggccagcttggcacttgatgtaattctccttggaatttgccctttttgagtttggatcttggttcattctcaagcctcagacagtggttcaaagtttttttcttccatttcaggtgtcgtgaggggatctggagctctcgagaattctcacgcgtgccgccaccatggccttaccagtgaccgccttgctcctgccgctggccttgctgctccacgccgccaggccggacatccagatgacacagactacatcctccctgtctgcctctctgggagacagagtcaccatcagttgcagggcaagtcaggacattagtaaatatttaaattggtatcagcagaaaccagatggaactgttaaactcctgatctaccatacatcaagattacactcaggagtcccatcaaggttcagtggcagtgggtctggaacagattattctctcaccattagcaacctggagcaagaagatattgccacttacttttgccaacagggtaatacgcttccgtacacgttcggaggcggcaccaagctggagatcacaggtggcggtggctcgggcggtggtgggtcgggtggcggcggatctgaggtgaaactgcaggagtcaggacctggcctggtggcgccctcacagagcctgtccgtcacatgcactgtctcaggggtctcattacccgactatggtgtaagctggattcgccagcctccacgaaagggtctggagtggctgggagtaatatggggtagtgaaaccacatactataattcagctctcaaatccagactgaccatcatcaaggacaactccaagagccaagttttcttaaaaatgaacagtctgcaaactgatgacacagccatttactactgtgccaaacattattactacggtggtagctatgctatggactactggggccaaggaacctcagtcaccgtctcctcagggaagcctatcccgaaccctctgttgggtctcgatagtaccaatggggccgcaaccacgacgccagcgccgcgaccaccaacaccggcgcccaccatcgcgttgcagcccctgtccctgcgcccagaggcgtgccggccagcggcggggggcgcagtgcacacgagggggctggacttcgcctgtgatttttgggtgctggtggtggttggtggagtcctggcttgctatagcttgctagtaacagtggcctttattattttctgggtgaggagtaagaggagcaggctcctgcacagtgactacatgaacatgactccccgccgccccgggcccacccgcaagcattaccagccctatgccccaccacgcgacttcgcagcctatcgctccaaacggggcagaaagaaactcctgtatatattcaaacaaccatttatgagaccagtacaaactactcaagaggaagatggctgtagctgccgatttccagaagaagaagaaggaggatgtgaactggggggtaccgaattcagcgggtcaggcggatctggaagtggtggtggagaacttgatgaattggtatacttactagatgggccaggttatgaccctatacattgcgatgtagtgacaaggggcggcagccaccttttcaatttttaagcggccgcgactctagagtcgacctgcaggcatgcaagcttgatatcaagcttatcgataatcaacctctggattacaaaatttgtgaaagattgactggtattcttaactatgttgctccttttacgctatgtggatacgctgctttaatgcctttgtatcatgctattgcttcccgtatggctttcattttctcctccttgtataaatcctggttgctgtctctttatgaggagttgtggcccgttgtcaggcaacgtggcgtggtgtgcactgtgtttgctgacgcaacccccactggttggggcattgccaccacctgtcagctcctttccgggactttcgctttccccctccctattgccacggcggaactcatcgccgcctgccttgcccgctgctggacaggggctcggctgttgggcactgacaattccgtggtgttgtcggggaaatcatcgtcctttccttggctgctcgcctgtgttgccacctggattctgcgcgggacgtccttctgctacgtcccttcggccctcaatccagcggaccttccttcccgcggcctgctgccggctctgcggcctcttccgcgtcttcgccttcgccctcagacgagtcggatctccctttgggccgcctccccgcat

SEQ ID NO: 240 - DNA, 11625 bp, Artificial Sequence
  synthetic vector
cgataccgtcgacctcgagggaattaattcgagctcggtacctttaagaccaatgacttacaaggcagctgtagatcttagccactttttaaaagaaaaggggggactggaagggctaattcactcccaacgaagacaagatctgctttttgcttgtactgggtctctctggttagaccagatctgagcctgggagctctctggctaactagggaacccactgcttaagcctcaataaagcttgccttgagtgcttcaagtagtgtgtgcccgtctgttgtgtgactctggtaactagagatccctcagacccttttagtcagtgtggaaaatctctagcagcatctagaattaattccgtgtattctatagtgtcacctaaatcgtatgtgtatgatacataaggttatgtattaattgtagccgcgttctaacgacaatatgtacaagcctaattgtgtagcatctggcttactgaagcagaccctatcatctctctcgtaaactgccgtcagagtcggtttggttggacgaaccttctgagtttctggtaacgccgtcccgcacccggaaatggtcagcgaaccaatcagcagggtcatcgctagccagatcctctacgccggacgcatcgtggccggcatcaccggcgccacaggtgcggttgctggcgcctatatcgccgacatcaccgatggggaagatcgggctcgccacttcgggctcatgagcgcttgtttcggcgtgggtatggtggcaggccccgtggccgggggactgttgggcgccatctccttgcatgcaccattccttgcggcggcggtgctcaacggcctcaacctactactgggctgcttcctaatgcaggagtcgcataagggagagcgtcgaatggtgcactctcagtacaatctgctctgatgccgcatagttaagccagccccgacacccgccaacacccgctgacgcgccctgacgggcttgtctgctcccggcatccgcttacagacaagctgtgaccgtctccgggagctgcatgtgtcagaggttttcaccgtcatcaccgaaacgcgcgagacgaaagggcctcgtgatacgcctatttttataggttaatgtcatgataataatggtttcttagacgtcaggtggcacttttcggggaaatgtgcgcggaacccctatttgtttatttttctaaatacattcaaatatgtatccgctcatgagacaataaccctgataaatgcttcaataatattgaaaaaggaagagtatgagtattcaacatttccgtgtcgcccttattcccttttttgcggcattttgccttcctgtttttgctcacccagaaacgctggtgaaagtaaaagatgctgaagatcagttgggtgcacgagtgggttacatcgaactggatctcaacagcggtaagatccttgagagttttcgccccgaagaacgttttccaatgatgagcacttttaaagttctgctatgtggcgcggtattatcccgtattgacgccgggcaagagcaactcggtcgccgcatacactattctcagaatgacttggttgagtactcaccagtcacagaaaagcatcttacggatggcatgacagtaagagaattatgcagtgctgccataaccatgagtgataacactgcggccaacttacttctgacaacgatcggaggaccgaaggagctaaccgcttttttgcacaacatgggggatcatgtaactcgccttgatcgttgggaaccggagctgaatgaagccataccaaacgacgagcgtgacaccacgatgcctgtagcaatggcaacaacgttgcgcaaactattaactggcgaactacttactctagcttcccggcaacaattaatagactggatggaggcggataaagttgcaggaccacttctgcgctcggcccttccggctggctggtttattgctgataaatctggagccggtgagcgtgggtctcgcggtatcattgcagcactggggccagatggtaagccctcccgtatcgtagttatctacacgacggggagtcaggcaactatggatgaacgaaatagacagatcgctgagataggtgcctcactgattaagcattggtaactgtcagaccaagtttactcatatatactttagattgatttaaaacttcatttttaatttaaaaggatctaggtgaagatcctttttgataatctcatgaccaaaatcccttaacgtgagttttcgttccactgagcgtcagaccccgtagaaaagatcaaaggatcttcttgagatcctttttttctgcgcgtaatctgctgcttgcaaacaaaaaaaccaccgctaccagcggtggtttgtttgccggatcaagagctaccaactctttttccgaaggtaactggcttcagcagagcgcagataccaaatactgtctttctagtgtagccgtagttaggccaccacttcaagaactctgtagcaccgcctacatacctcgctctgctaatcctgttaccagtggctgctgccagtggcgataagtcgtgtcttaccgggttggactcaagacgatagttaccggataaggcgcagcggtcgggctgaacggggggttcgtgcacacagcccagcttggagcgaacgacctacaccgaactgagatacctacagcgtgagctatgagaaagcgccacgcttcccgaagggagaaaggcggacaggtatccggtaagcggcagggtcggaacaggagagcgcacgagggagcttccagggggaaacgcctggtatctttatagtcctgtcgggtttcgccacctctgacttgagcgtcgatttttgtgatgctcgtcaggggggcggagcctatggaaaaacgccagcaacgcggcctttttacggttcctggccttttgctggccttttgctcacatgttctttcctgcgttatcccctgattctgtggataaccgtattaccgcctttgagtgagctgataccgctcgccgcagccgaacgaccgagcgcagcgagtcagtgagcgaggaagcggaagagcgcccaatacgcaaaccgcctctccccgcgcgttggccgattcattaatgcagctgtggaatgtgtgtcagttagggtgtggaaagtccccaggctccccagcaggcagaagtatgcaaagcatgcatctcaattagtcagcaaccaggtgtggaaagtccccaggctccccagcaggcagaagtatgcaaagcatgcatctcaattagtcagcaaccatagtcccgcccctaactccgcccatcccgcccctaactccgcccagttccgcccattctccgccccatggctgactaattttttttatttatgcagaggccgaggccgcctcggcctctgagctattccagaagtagtgaggaggcttttttggaggcctaggcttttgcaaaaagcttggacacaagacaggcttgcgagatatgtttgagaataccactttatcccgcgtcagggagaggcagtgcgtaaaaagacgcggactcatgtgaaatactggtttttagtgcgccagatctctataatctcgcgcaacctattttcccctcgaacactttttaagccgtagataaacaggctgggacacttcacatgagcgaaaaatacatcgtcacctgggacatgttgcagatccatgcacgtaaactcgcaagccgactgatgccttctgaacaatggaaaggcattattgccgtaagccgtggcggtctgtaccgggtgcgttactggcgcgtgaactgggtattcgtcatgtcgataccgtttgtatttccagctacgatcacgacaaccagcgcgagcttaaagtgctgaaacgcgcagaaggcgatggcgaaggcttcatcgttattgatgacctggtggataccggtggtactgcggttgcgattcgtgaaatgtatccaaaagcgcactttgtcaccatcttcgcaaaaccggctggtcgtccgctggttgatgactatgttgttgatatcccgcaagatacctggattgaacagccgtgggatatgggcgtcgtattcgtcccgccaatctccggtcgctaatcttttcaacgcctggcactgccgggcgttgttctttttaacttcaggcgggttacaatagtttccagtaagtattctggaggctgcatccatgacacaggcaaacctgagcgaaaccctgttcaaaccccgctttaaacatcctgaaacctcgacgctagtccgccgctttaatcacggcgcacaaccgcctgtgcagtcggcccttgatggtaaaaccatccctcactggtatcgcatgattaaccgtctgatgtggatctggcgcggcattgacccacgcgaaatcctcgacgtccaggcacgtattgtgatgagcgatgccgaacgtaccgacgatgatttatacgatacggtgattggctaccgtggcggcaactggatttatgagtgggccccggatctttgtgaaggaaccttacttctgtggtgtgacataattggacaaactacctacagagatttaaagctctaaggtaaatataaaatttttaagtgtataatgtgttaaactactgattctaattgtttgtgtattttagattccaacctatggaactgatgaatgggagcagtggtggaatgcctttaatgaggaaaacctgttttgctcagaagaaatgccatctagtgatgatgaggctactgctgactctcaacattctactcctccaaaaaagaagagaaaggtagaagaccccaaggactttccttcagaattgctaagttttttgagtcatgctgtgtttagtaatagaactcttgcttgctttgctatttacaccacaaaggaaaaagctgcactgctatacaagaaaattatggaaaaatattctgtaacctttataagtaggcataacagttataatcataacatactgttttttcttactccacacaggcatagagtgtctgctattaataactatgctcaaaaattgtgtacctttagctttttaatttgtaaaggggttaataaggaatatttgatgtatagtgccttgactagagatcataatcagccataccacatttgtagaggttttacttgctttaaaaaacctcccacacctccccctgaacctgaaacataaaatgaatgcaattgttgttgttaacttgtttattgcagcttataatggttacaaataaagcaatagcatcacaaatttcacaaataaagcatttttttcactgcattctagttgtggtttgtccaaactcatcaatgtatcttatcatgtctggatcaactggataactcaagctaaccaaaatcatcccaaacttcccaccccataccctattaccactgccaattacctagtggtttcatttactctaaacctgtgattcctctgaattattttcattttaaagaaattgtatttgttaaatatgtactacaaacttagtagttggaagggctaattcactcccaaagaagacaagatatccttgatctgtggatctaccacacacaaggctacttccctgattagcagaactacacaccagggccaggggtcagatatccactgacctttggatggtgctacaagctagtaccagttgagccagataaggtagaagaggccaataaaggagagaacaccagcttgttacaccctgtgagcctgcatgggatggatgacccggagagagaagtgttagagtggaggtttgacagccgcctagcatttcatcacgtggcccgagagctgcatccggagtacttcaagaactgctgatatcgagcttgctacaagggactttccgctggggactttccagggaggcgtggcctgggcgggactggggagtggcgagccctcagatcctgcatataagcagctgctttttgcctgtactgggtctctctggttagaccagatctgagcctgggagctctctggctaactagggaacccactgcttaagcctcaataaagcttgccttgagtgcttcaagtagtgtgtgcccgtctgttgtgtgactctggtaactagagatccctcagacccttttagtcagtgtggaaaatctctagcagtggcgcccgaacagggacttgaaagcgaaagggaaaccagaggagctctctcgacgcaggactcggcttgctgaagcgcgcacggcaagaggcgaggggcggcgactggtgagtacgccaaaaattttgactagcggaggctagaaggagagagatgggtgcgagagcgtcagtattaagcgggggagaattagatcgcgatgggaaaaaattcggttaaggccagggggaaagaaaaaatataaattaaaacatatagtatgggcaagcagggagctagaacgattcgcagttaatcctggcctgttagaaacatcagaaggctgtagacaaatactgggacagctacaaccatcccttcagacaggatcagaagaacttagatcattatataatacagtagcaaccctctattgtgtgcatcaaaggatagagataaaagacaccaaggaagctttagacaagatagaggaagagcaaaacaaaagtaagaccaccgcacagcaagcggccggccgctgatcttcagacctggaggaggagatatgagggacaattggagaagtgaattatataaatataaagtagtaaaaattgaaccattaggagtagcacccaccaaggcaaagagaagagtggtgcagagagaaaaaagagcagtgggaataggagctttgttccttgggttcttgggagcagcaggaagcactatgggcgcagcgtcaatgacgctgacggtacaggccagacaattattgtctggtatagtgcagcagcagaacaatttgctgagggctattgaggcgcaacagcatctgttgcaactcacagtctggggcatcaagcagctccaggcaagaatcctggctgtgaaagatacctaaaggatcaacagctcctggggatttggggttgctctggaaaactcatttgcaccactgctgtgccttggaatgctagttggagtaataaatctctggaacagatttggaatcacacgacctggatggagtgggacagagaaattaacaattacacaagcttaatacactccttaattgaagaatcgcaaaaccagcaagaaaagaatgaacaagaattattggaattagataaatgggcaagtttgtggaattggtttaacataacaaattggctgtggtatataaaattattcataatgatagtaggaggcttggtaggtttaagaatagtttttgctgtactttctatagtgaatagagttaggcagggatattcaccattatcgtttcagacccacctcccaaccccgaggggacccgacaggcccgaaggaatagaagaagaaggtggagagagagacagagacagatccattcgattagtgaacggatctcgacggtatcgccaaatggcagtattcatccacaattttaaaagaaaaggggggattggggggtacagtgcaggggaaagaatagtagacataatagcaacagacatacaaactaaagaattacaaaaacaaattacaaaaattcaaaattttcgggtttattacagggacagcagagatccagtttggatcgataagcttgatatcgaattcctgcagcccgtgaggctccggtgcccgtcagtgggcagagcgcacatcgcccacagtccccgagaagttggggggaggggtcggcaattgaaccggtgcctagagaaggtggcgcggggtaaactgggaaagtgatgtcgtgtactggctccgcctttttcccgagggtgggggagaaccgtatataagtgcagtagtcgccgtgaacgttctttttcgcaacgggtttgccgccagaacacaggtaagtgccgtgtgtggttcccgcgggcctggcctctttacgggttatggcccttgcgtgccttgaattacttccacctggctgcagtacgtgattcttgatcccgagcttcgggttggaagtgggtgggagagttcgaggccttgcgcttaaggagccccttcgcctcgtgcttgagttgaggcctggcctgggcgctggggccgccgcgtgcgaatctggtggcaccttcgcgcctgtctcgctgctttcgataagtctctagccatttaaaatttttgatgacctgctgcgacgctttttttctggcaagatagtcttgtaaatgcgggccaagatctgcacactggtatttcggtttttggggccgcgggcggcgacggggcccgtgcgtcccagcgcacatgttcggcgaggcggggcctgcgagcgcggccaccgagaatcggacgggggtagtctcaagctggccggcctgctctggtgcctggcctcgcgccgccgtgtatcgccccgccctgggcggcaaggctggcccggtcggcaccagttgcgtgagcggaaagatggccgcttcccggccctgctgcagggagctcaaaatggaggacgcggcgctcgggagagcgggcgggtgagtcacccacacaaaggaaaagggcctttccgtcctcagccgtcgcttcatgtgactccacggagtaccgggcgccgtccaggcacctcgattagttctcgagcttttggagtacgtcgtctttaggttggggggaggggttttatgcgatggagtttccccacactgagtgggtggagactgaagttaggccagcttggcacttgatgtaattctccttggaatttgccctttttgagtttggatcttggttcattctcaagcctcagacagtggttcaaagtttttttcttccatttcaggtgtcgtgaggggatctggagctctcgagaattctcacgcgtgccgccaccatgattcatcttggtcacatcctcttcttgctgctgttgccagttgctgccgcacaaacaaccccaggtgagaggtcaagtcttcccgccttctatccgggcacaagcgggagttgtagtgggtgtggatctttgtcccttcctatatacatctgggctcctctggctggcacttgcggagtgcttctgctgagtctggttattaccaaacggggcagaaagaaactcctgtatatattcaaacaaccatttatgagaccagtacaaactactcaagaggaagatggctgtagctgccgatttccagaagaagaagaaggaggatgtgaactgggttctgttgttattgttggtagaattattttatctggtagtggtagtatcacggcctactcccaacagacgcggggcctacttggttgcatcatcactagcctcacaggccgggacaagaaccaggtcgaaggggaggttcaagtggtttctaccgcaacacaatctttcctggcgacctgcgtcaacggcgtgtgctggactgtctaccatggcgctggctcgaagaccctagccggtccaaaaggtccaatcacccaaatgtacaccaatgtagaccaggacctcgtcggctggcaggcgcctccaggggcgcgctccttgacaccatgcacctgtggcagctcggacctttacttggtcacgagacatgctgatgtcattccggtgcgccggcgaggcgacagcaggggaagtctactctcccccaggcccgtctcctacctgaaaggctccgcaggtggtccattgctttgcccttcggggcacgctgtgggcatcttccgggctgctgtgtgcacccggggggtcgcgaaggcggtggacttcgtgcccgttgagtctatggaaactaccatgcggtctagagtgaagttcagcaggagcgcagacgcccccgcgtacaagcagggccagaaccagctctataacgagctcaatctaggacgaagagaggagtacgatgttttggacaagagacgtggccgggaccctgagatggggggaaagccgagaaggaagaaccctcaggaaggcctgtacaatgaactgcagaaagataagatggcggaggcctacagtgagattgggatgaaaggcgagcgccggaggggcaaggggcacgatggcctttaccagggtctcagtacagccaccaaggacacctacgacgcccttcacatgcaggccctgccccctcgcggcatggtgagcaagggcgaggaggataacatggccatcatcaaggagttcatgcgcttcaaggtgcacatggagggctccgtgaacggccacgagttcgagatcgagggcgagggcgagggccgcccctacgagggcacccagaccgccaagctgaaggtgaccaagggtggccccctgcccttcgcctgggacatcctgtcccctcagttcatgtacggctccaaggcctacgtgaagcaccccgccgacatccccgactacttgaagctgtccttccccgagggcttcaagtgggagcgcgtgatgaacttcgaggacggcggcgtggtgaccgtgacccaggactcctccctgcaggacggcgagttcatctacaaggtgaagctgcgcggcaccaacttcccctccgacggccccgtaatgcagaagaagaccatgggctgggaggcctcctccgagcggatgtaccccgaggacggcgccctgaagggcgagatcaagcagaggctgaagctgaaggacggcggccactacgacgctgaggtcaagaccacctacaaggccaagaagcccgtgcagctgcccggcgcctacaacgtcaacatcaagttggacatcacctcccacaacgaggactacaccatcgtggaacagtacgaacgcgccgagggccgccactccaccggcggcatggacgagctgtacaagtaagcggccgcgactctagagtcgacctgcaggcatgcaagcttgatatcaagcttatcgataatcaacctctggattacaaaatttgtgaaagattgactggtattcttaactatgttgctccttttacgctatgtggatacgctgctttaatgcctttgtatcatgctattgcttcccgtatggctttcattttctcctccttgtataaatcctggttgctgtctctttatgaggagttgtggcccgttgtcaggcaacgtggcgtggtgtgcactgtgtttgctgacgcaacccccactggttggggcattgccaccacctgtcagctcctttccgggactttcgctttccccctccctattgccacggcggaactcatcgccgcctgccttgcccgctgctggacaggggctcggctgttgggcactgacaattccgtggtgttgtcggggaaatcatcgtcctttccttggctgctcgcctgtgttgccacctggattctgcgcgggacgtccttctgctacgtcccttcggccctcaatccagcggaccttccttcccgcggcctgctgccggctctgcggcctcttccgcgtcttcgccttcgccctcagacgagtcggatctccctttgggccgcctccccgcat

SEQ ID NO: 241 - DNA, 11625 bp, Artificial Sequence
  synthetic vector
cgataccgtcgacctcgagggaattaattcgagctcggtacctttaagaccaatgacttacaaggcagctgtagatcttagccactttttaaaagaaaaggggggactggaagggctaattcactcccaacgaagacaagatctgctttttgcttgtactgggtctctctggttagaccagatctgagcctgggagctctctggctaactagggaacccactgcttaagcctcaataaagcttgccttgagtgcttcaagtagtgtgtgcccgtctgttgtgtgactctggtaactagagatccctcagacccttttagtcagtgtggaaaatctctagcagcatctagaattaattccgtgtattctatagtgtcacctaaatcgtatgtgtatgatacataaggttatgtattaattgtagccgcgttctaacgacaatatgtacaagcctaattgtgtagcatctggcttactgaagcagaccctatcatctctctcgtaaactgccgtcagagtcggtttggttggacgaaccttctgagtttctggtaacgccgtcccgcacccggaaatggtcagcgaaccaatcagcagggtcatcgctagccagatcctctacgccggacgcatcgtggccggcatcaccggcgccacaggtgcggttgctggcgcctatatcgccgacatcaccgatggggaagatcgggctcgccacttcgggctcatgagcgcttgtttcggcgtgggtatggtggcaggccccgtggccgggggactgttgggcgccatctccttgcatgcaccattccttgcggcggcggtgctcaacggcctcaacctactactgggctgcttcctaatgcaggagtcgcataagggagagcgtcgaatggtgcactctcagtacaatctgctctgatgccgcatagttaagccagccccgacacccgccaacacccgctgacgcgccctgacgggcttgtctgctcccggcatccgcttacagacaagctgtgaccgtctccgggagctgcatgtgtcagaggttttcaccgtcatcaccgaaacgcgcgagacgaaagggcctcgtgatacgcctatttttataggttaatgtcatgataataatggtttcttagacgtcaggtggcacttttcggggaaatgtgcgcggaacccctatttgtttatttttctaaatacattcaaatatgtatccgctcatgagacaataaccctgataaatgcttcaataatattgaaaaaggaagagtatgagtattcaacatttccgtgtcgcccttattcccttttttgcggcattttgccttcctgtttttgctcacccagaaacgctggtgaaagtaaaagatgctgaagatcagttgggtgcacgagtgggttacatcgaactggatctcaacagcggtaagatccttgagagttttcgccccgaagaacgttttccaatgatgagcacttttaaagttctgctatgtggcgcggtattatcccgtattgacgccgggcaagagcaactcggtcgccgcatacactattctcagaatgacttggttgagtactcaccagtcacagaaaagcatcttacggatggcatgacagtaagagaattatgcagtgctgccataaccatgagtgataacactgcggccaacttacttctgacaacgatcggaggaccgaaggagctaaccgcttttttgcacaacatgggggatcatgtaactcgccttgatcgttgggaaccggagctgaatgaagccataccaaacgacgagcgtgacaccacgatgcctgtagcaatggcaacaacgttgcgcaaactattaactggcgaactacttactctagcttcccggcaacaattaatagactggatggaggcggataaagttgcaggaccacttctgcgctcggcccttccggctggctggtttattgctgataaatctggagccggtgagcgtgggtctcgcggtatcattgcagcactggggccagatggtaagccctcccgtatcgtagttatctacacgacggggagtcaggcaactatggatgaacgaaatagacagatcgctgagataggtgcctcactgattaagcattggtaactgtcagaccaagtttactcatatatactttagattgatttaaaacttcatttttaatttaaaaggatctaggtgaagatcctttttgataatctcatgaccaaaatcccttaacgtgagttttcgttccactgagcgtcagaccccgtagaaaagatcaaaggatcttcttgagatcctttttttctgcgcgtaatctgctgcttgcaaacaaaaaaaccaccgctaccagcggtggtttgtttgccggatcaagagctaccaactctttttccgaaggtaactggcttcagcagagcgcagataccaaatactgtctttctagtgtagccgtagttaggccaccacttcaagaactctgtagcaccgcctacatacctcgctctgctaatcctgttaccagtggctgctgccagtggcgataagtcgtgtcttaccgggttggactcaagacgatagttaccggataaggcgcagcggtcgggctgaacggggggttcgtgcacacagcccagcttggagcgaacgacctacaccgaactgagatacctacagcgtgagctatgagaaagcgccacgcttcccgaagggagaaaggcggacaggtatccggtaagcggcagggtcggaacaggagagcgcacgagggagcttccagggggaaacgcctggtatctttatagtcctgtcgggtttcgccacctctgacttgagcgtcgatttttgtgatgctcgtcaggggggcggagcctatggaaaaacgccagcaacgcggcctttttacggttcctggccttttgctggccttttgctcacatgttctttcctgcgttatcccctgattctgtggataaccgtattaccgcctttgagtgagctgataccgctcgccgcagccgaacgaccgagcgcagcgagtcagtgagcgaggaagcggaagagcgcccaatacgcaaaccgcctctccccgcgcgttggccgattcattaatgcagctgtggaatgtgtgtcagttagggtgtggaaagtccccaggctccccagcaggcagaagtatgcaaagcatgcatctcaattagtcagcaaccaggtgtggaaagtccccaggctccccagcaggcagaagtatgcaaagcatgcatctcaattagtcagcaaccatagtcccgcccctaactccgcccatcccgcccctaactccgcccagttccgcccattctccgccccatggctgactaattttttttatttatgcagaggccgaggccgcctcggcctctgagctattccagaagtagtgaggaggcttttttggaggcctaggcttttgcaaaaagcttggacacaagacaggcttgcgagatatgtttgagaataccactttatcccgcgtcagggagaggcagtgcgtaaaaagacgcggactcatgtgaaatactggtttttagtgcgccagatctctataatctcgcgcaacctattttcccctcgaacactttttaagccgtagataaacaggctgggacacttcacatgagcgaaaaatacatcgtcacctgggacatgttgcagatccatgcacgtaaactcgcaagccgactgatgccttctgaacaatggaaaggcattattgccgtaagccgtggcggtctgtaccgggtgcgttactggcgcgtgaactgggtattcgtcatgtcgataccgtttgtatttccagctacgatcacgacaaccagcgcgagcttaaagtgctgaaacgcgcagaaggcgatggcgaaggcttcatcgttattgatgacctggtggataccggtggtactgcggttgcgattcgtgaaatgtatccaaaagcgcactttgtcaccatcttcgcaaaaccggctggtcgtccgctggttgatgactatgttgttgatatcccgcaagatacctggattgaacagccgtgggatatgggcgtcgtattcgtcccgccaatctccggtcgctaatcttttcaacgcctggcactgccgggcgttgttctttttaacttcaggcgggttacaatagtttccagtaagtattctggaggctgcatccatgacacaggcaaacctgagcgaaaccctgttcaaaccccgctttaaacatcctgaaacctcgacgctagtccgccgctttaatcacggcgcacaaccgcctgtgcagtcggcccttgatggtaaaaccatccctcactggtatcgcatgattaaccgtctgatgtggatctggcgcggcattgacccacgcgaaatcctcgacgtccaggcacgtattgtgatgagcgatgccgaacgtaccgacgatgatttatacgatacggtgattggctaccgtggcggcaactggatttatgagtgggccccggatctttgtgaaggaaccttacttctgtggtgtgacataattggacaaactacctacagagatttaaagctctaaggtaaatataaaatttttaagtgtataatgtgttaaactactgattctaattgtttgtgtattttagattccaacctatggaactgatgaatgggagcagtggtggaatgcctttaatgaggaaaacctgttttgctcagaagaaatgccatctagtgatgatgaggctactgctgactctcaacattctactcctccaaaaaagaagagaaaggtagaagaccccaaggactttccttcagaattgctaagttttttgagtcatgctgtgtttagtaatagaactcttgcttgctttgctatttacaccacaaaggaaaaagctgcactgctatacaagaaaattatggaaaaatattctgtaacctttataagtaggcataacagttataatcataacatactgttttttcttactccacacaggcatagagtgtctgctattaataactatgctcaaaaattgtgtacctttagctttttaatttgtaaaggggttaataaggaatatttgatgtatagtgccttgactagagatcataatcagccataccacatttgtagaggttttacttgctttaaaaaacctcccacacctccccctgaacctgaaacataaaatgaatgcaattgttgttgttaacttgtttattgcagcttataatggttacaaataaagcaatagcatcacaaatttcacaaataaagcatttttttcactgcattctagttgtggtttgtccaaactcatcaatgtatcttatcatgtctggatcaactggataactcaagctaaccaaaatcatcccaaacttcccaccccataccctattaccactgccaattacctagtggtttcatttactctaaacctgtgattcctctgaattattttcattttaaagaaattgtatttgttaaatatgtactacaaacttagtagttggaagggctaattcactcccaaagaagacaagatatccttgatctgtggatctaccacacacaaggctacttccctgattagcagaactacacaccagggccaggggtcagatatccactgacctttggatggtgctacaagctagtaccagttgagccagataaggtagaagaggccaataaaggagagaacaccagcttgttacaccctgtgagcctgcatgggatggatgacccggagagagaagtgttagagtggaggtttgacagccgcctagcatttcatcacgtggcccgagagctgcatccggagtacttcaagaactgctgatatcgagcttgctacaagggactttccgctggggactttccagggaggcgtggcctgggcgggactggggagtggcgagccctcagatcctgcatataagcagctgctttttgcctgtactgggtctctctggttagaccagatctgagcctgggagctctctggctaactagggaacccactgcttaagcctcaataaagcttgccttgagtgcttcaagtagtgtgtgcccgtctgttgtgtgactctggtaactagagatccctcagacccttttagtcagtgtggaaaatctctagcagtggcgcccgaacagggacttgaaagcgaaagggaaaccagaggagctctctcgacgcaggactcggcttgctgaagcgcgcacggcaagaggcgaggggcggcgactggtgagtacgccaaaaattttgactagcggaggctagaaggagagagatgggtgcgagagcgtcagtattaagcgggggagaattagatcgcgatgggaaaaaattcggttaaggccagggggaaagaaaaaatataaattaaaacatatagtatgggcaagcagggagctagaacgattcgcagttaatcctggcctgttagaaacatcagaaggctgtagacaaatactgggacagctacaaccatcccttcagacaggatcagaagaacttagatcattatataatacagtagcaaccctctattgtgtgcatcaaaggatagagataaaagacaccaaggaagctttagacaagatagaggaagagcaaaacaaaagtaagaccaccgcacagcaagcggccggccgctgatcttcagacctggaggaggagatatgagggacaattggagaagtgaattatataaatataaagtagtaaaaattgaaccattaggagtagcacccaccaaggcaaagagaagagtggtgcagagagaaaaaagagcagtgggaataggagctttgttccttgggttcttgggagcagcaggaagcactatgggcgcagcgtcaatgacgctgacggtacaggccagacaattattgtctggtatagtgcagcagcagaacaatttgctgagggctattgaggcgcaacagcatctgttgcaactcacagtctggggcatcaagcagctccaggcaagaatcctggctgtgaaagatacctaaaggatcaacagctcctggggatttggggttgctctggaaaactcatttgcaccactgctgtgccttggaatgctagttggagtaataaatctctggaacagatttggaatcacacgacctggatggagtgggacagagaaattaacaattacacaagcttaatacactccttaattgaagaatcgcaaaaccagcaagaaaagaatgaacaagaattattggaattagataaatgggcaagtttgtggaattggtttaacataacaaattggctgtggtatataaaattattcataatgatagtaggaggcttggtaggtttaagaatagtttttgctgtactttctatagtgaatagagttaggcagggatattcaccattatcgtttcagacccacctcccaaccccgaggggacccgacaggcccgaaggaatagaagaagaaggtggagagagagacagagacagatccattcgattagtgaacggatctcgacggtatcgccaaatggcagtattcatccacaattttaaaagaaaaggggggattggggggtacagtgcaggggaaagaatagtagacataatagcaacagacatacaaactaaagaattacaaaaacaaattacaaaaattcaaaattttcgggtttattacagggacagcagagatccagtttggatcgataagcttgatatcgaattcctgcagcccgtgaggctccggtgcccgtcagtgggcagagcgcacatcgcccacagtccccgagaagttggggggaggggtcggcaattgaaccggtgcctagagaaggtggcgcggggtaaactgggaaagtgatgtcgtgtactggctccgcctttttcccgagggtgggggagaaccgtatataagtgcagtagtcgccgtgaacgttctttttcgcaacgggtttgccgccagaacacaggtaagtgccgtgtgtggttcccgcgggcctggcctctttacgggttatggcccttgcgtgccttgaattacttccacctggctgcagtacgtgattcttgatcccgagcttcgggttggaagtgggtgggagagttcgaggccttgcgcttaaggagccccttcgcctcgtgcttgagttgaggcctggcctgggcgctggggccgccgcgtgcgaatctggtggcaccttcgcgcctgtctcgctgctttcgataagtctctagccatttaaaatttttgatgacctgctgcgacgctttttttctggcaagatagtcttgtaaatgcgggccaagatctgcacactggtatttcggtttttggggccgcgggcggcgacggggcccgtgcgtcccagcgcacatgttcggcgaggcggggcctgcgagcgcggccaccgagaatcggacgggggtagtctcaagctggccggcctgctctggtgcctggcctcgcgccgccgtgtatcgccccgccctgggcggcaaggctggcccggtcggcaccagttgcgtgagcggaaagatggccgcttcccggccctgctgcagggagctcaaaatggaggacgcggcgctcgggagagcgggcgggtgagtcacccacacaaaggaaaagggcctttccgtcctcagccgtcgcttcatgtgactccacggagtaccgggcgccgtccaggcacctcgattagttctcgagcttttggagtacgtcgtctttaggttggggggaggggttttatgcgatggagtttccccacactgagtgggtggagactgaagttaggccagcttggcacttgatgtaattctccttggaatttgccctttttgagtttggatcttggttcattctcaagcctcagacagtggttcaaagtttttttcttccatttcaggtgtcgtgaggggatctggagctctcgagaattctcacgcgtgccgccaccatgattcatcttggtcacatcctcttcttgctgctgttgccagttgctgccgcacaaacaaccccaggtgagaggtcaagtcttcccgccttctatccgggcacaagcgggagttgtagtgggtgtggatctttgtcccttcctatatacatctgggctcctctggctggcacttgcggagtgcttctgctgagtctggttattaccaaacggggcagaaagaaactcctgtatatattcaaacaaccatttatgagaccagtacaaactactcaagaggaagatggctgtagctgccgatttccagaagaagaagaaggaggatgtgaactgagagtgaagttcagcaggagcgcagacgcccccgcgtacaagcagggccagaaccagctctataacgagctcaatctaggacgaagagaggagtacgatgttttggacaagagacgtggccgggaccctgagatggggggaaagccgagaaggaagaaccctcaggaaggcctgtacaatgaactgcagaaagataagatggcggaggcctacagtgagattgggatgaaaggcgagcgccggaggggcaaggggcacgatggcctttaccagggtctcagtacagccaccaaggacacctacgacgcccttcacatgcaggccctgccccctcgcggttctgttgttattgttggtagaattattttatctggtagtggtagtatcacggcctactcccaacagacgcggggcctacttggttgcatcatcactagcctcacaggccgggacaagaaccaggtcgaaggggaggttcaagtggtttctaccgcaacacaatctttcctggcgacctgcgtcaacggcgtgtgctggactgtctaccatggcgctggctcgaagaccctagccggtccaaaaggtccaatcacccaaatgtacaccaatgtagaccaggacctcgtcggctggcaggcgcctccaggggcgcgctccttgacaccatgcacctgtggcagctcggacctttacttggtcacgagacatgctgatgtcattccggtgcgccggcgaggcgacagcaggggaagtctactctcccccaggcccgtctcctacctgaaaggctccgcaggtggtccattgctttgcccttcggggcacgctgtgggcatcttccgggctgctgtgtgcacccggggggtcgcgaaggcggtggacttcgtgcccgttgagtctatggaaactaccatgcggtctggcatggtgagcaagggcgaggaggataacatggccatcatcaaggagttcatgcgcttcaaggtgcacatggagggctccgtgaacggccacgagttcgagatcgagggcgagggcgagggccgcccctacgagggcacccagaccgccaagctgaaggtgaccaagggtggccccctgcccttcgcctgggacatcctgtcccctcagttcatgtacggctccaaggcctacgtgaagcaccccgccgacatccccgactacttgaagctgtccttccccgagggcttcaagtgggagcgcgtgatgaacttcgaggacggcggcgtggtgaccgtgacccaggactcctccctgcaggacggcgagttcatctacaaggtgaagctgcgcggcaccaacttcccctccgacggccccgtaatgcagaagaagaccatgggctgggaggcctcctccgagcggatgtaccccgaggacggcgccctgaagggcgagatcaagcagaggctgaagctgaaggacggcggccactacgacgctgaggtcaagaccacctacaaggccaagaagcccgtgcagctgcccggcgcctacaacgtcaacatcaagttggacatcacctcccacaacgaggactacaccatcgtggaacagtacgaacgcgccgagggccgccactccaccggcggcatggacgagctgtacaagtaagcggccgcgactctagagtcgacctgcaggcatgcaagcttgatatcaagcttatcgataatcaacctctggattacaaaatttgtgaaagattgactggtattcttaactatgttgctccttttacgctatgtggatacgctgctttaatgcctttgtatcatgctattgcttcccgtatggctttcattttctcctccttgtataaatcctggttgctgtctctttatgaggagttgtggcccgttgtcaggcaacgtggcgtggtgtgcactgtgtttgctgacgcaacccccactggttggggcattgccaccacctgtcagctcctttccgggactttcgctttccccctccctattgccacggcggaactcatcgccgcctgccttgcccgctgctggacaggggctcggctgttgggcactgacaattccgtggtgttgtcggggaaatcatcgtcctttccttggctgctcgcctgtgttgccacctggattctgcgcgggacgtccttctgctacgtcccttcggccctcaatccagcggaccttccttcccgcggcctgctgccggctctgcggcctcttccgcgtcttcgccttcgccctcagacgagtcggatctccctttgggccgcctccccgcat

SEQ ID NO: 242 - DNA, 11499 bp, Artificial Sequence
  synthetic vector
cgataccgtcgacctcgagggaattaattcgagctcggtacctttaagaccaatgacttacaaggcagctgtagatcttagccactttttaaaagaaaaggggggactggaagggctaattcactcccaacgaagacaagatctgctttttgcttgtactgggtctctctggttagaccagatctgagcctgggagctctctggctaactagggaacccactgcttaagcctcaataaagcttgccttgagtgcttcaagtagtgtgtgcccgtctgttgtgtgactctggtaactagagatccctcagacccttttagtcagtgtggaaaatctctagcagcatctagaattaattccgtgtattctatagtgtcacctaaatcgtatgtgtatgatacataaggttatgtattaattgtagccgcgttctaacgacaatatgtacaagcctaattgtgtagcatctggcttactgaagcagaccctatcatctctctcgtaaactgccgtcagagtcggtttggttggacgaaccttctgagtttctggtaacgccgtcccgcacccggaaatggtcagcgaaccaatcagcagggtcatcgctagccagatcctctacgccggacgcatcgtggccggcatcaccggcgccacaggtgcggttgctggcgcctatatcgccgacatcaccgatggggaagatcgggctcgccacttcgggctcatgagcgcttgtttcggcgtgggtatggtggcaggccccgtggccgggggactgttgggcgccatctccttgcatgcaccattccttgcggcggcggtgctcaacggcctcaacctactactgggctgcttcctaatgcaggagtcgcataagggagagcgtcgaatggtgcactctcagtacaatctgctctgatgccgcatagttaagccagccccgacacccgccaacacccgctgacgcgccctgacgggcttgtctgctcccggcatccgcttacagacaagctgtgaccgtctccgggagctgcatgtgtcagaggttttcaccgtcatcaccgaaacgcgcgagacgaaagggcctcgtgatacgcctatttttataggttaatgtcatgataataatggtttcttagacgtcaggtggcacttttcggggaaatgtgcgcggaacccctatttgtttatttttctaaatacattcaaatatgtatccgctcatgagacaataaccctgataaatgcttcaataatattgaaaaaggaagagtatgagtattcaacatttccgtgtcgcccttattcccttttttgcggcattttgccttcctgtttttgctcacccagaaacgctggtgaaagtaaaagatgctgaagatcagttgggtgcacgagtgggttacatcgaactggatctcaacagcggtaagatccttgagagttttcgccccgaagaacgttttccaatgatgagcacttttaaagttctgctatgtggcgcggtattatcccgtattgacgccgggcaagagcaactcggtcgccgcatacactattctcagaatgacttggttgagtactcaccagtcacagaaaagcatcttacggatggcatgacagtaagagaattatgcagtgctgccataaccatgagtgataacactgcggccaacttacttctgacaacgatcggaggaccgaaggagctaaccgcttttttgcacaacatgggggatcatgtaactcgccttgatcgttgggaaccggagctgaatgaagccataccaaacgacgagcgtgacaccacgatgcctgtagcaatggcaacaacgttgcgcaaactattaactggcgaactacttactctagcttcccggcaacaattaatagactggatggaggcggataaagttgcaggaccacttctgcgctcggcccttccggctggctggtttattgctgataaatctggagccggtgagcgtgggtctcgcggtatcattgcagcactggggccagatggtaagccctcccgtatcgtagttatctacacgacggggagtcaggcaactatggatgaacgaaatagacagatcgctgagataggtgcctcactgattaagcattggtaactgtcagaccaagtttactcatatatactttagattgatttaaaacttcatttttaatttaaaaggatctaggtgaagatcctttttgataatctcatgaccaaaatcccttaacgtgagttttcgttccactgagcgtcagaccccgtagaaaagatcaaaggatcttcttgagatcctttttttctgcgcgtaatctgctgcttgcaaacaaaaaaaccaccgctaccagcggtggtttgtttgccggatcaagagctaccaactctttttccgaaggtaactggcttcagcagagcgcagataccaaatactgtctttctagtgtagccgtagttaggccaccacttcaagaactctgtagcaccgcctacatacctcgctctgctaatcctgttaccagtggctgctgccagtggcgataagtcgtgtcttaccgggttggactcaagacgatagttaccggataaggcgcagcggtcgggctgaacggggggttcgtgcacacagcccagcttggagcgaacgacctacaccgaactgagatacctacagcgtgagctatgagaaagcgccacgcttcccgaagggagaaaggcggacaggtatccggtaagcggcagggtcggaacaggagagcgcacgagggagcttccagggggaaacgcctggtatctttatagtcctgtcgggtttcgccacctctgacttgagcgtcgatttttgtgatgctcgtcaggggggcggagcctatggaaaaacgccagcaacgcggcctttttacggttcctggccttttgctggccttttgctcacatgttctttcctgcgttatcccctgattctgtggataaccgtattaccgcctttgagtgagctgataccgctcgccgcagccgaacgaccgagcgcagcgagtcagtgagcgaggaagcggaagagcgcccaatacgcaaaccgcctctccccgcgcgttggccgattcattaatgcagctgtggaatgtgtgtcagttagggtgtggaaagtccccaggctccccagcaggcagaagtatgcaaagcatgcatctcaattagtcagcaaccaggtgtggaaagtccccaggctccccagcaggcagaagtatgcaaagcatgcatctcaattagtcagcaaccatagtcccgcccctaactccgcccatcccgcccctaactccgcccagttccgcccattctccgccccatggctgactaattttttttatttatgcagaggccgaggccgcctcggcctctgagctattccagaagtagtgaggaggcttttttggaggcctaggcttttgcaaaaagcttggacacaagacaggcttgcgagatatgtttgagaataccactttatcccgcgtcagggagaggcagtgcgtaaaaagacgcggactcatgtgaaatactggtttttagtgcgccagatctctataatctcgcgcaacctattttcccctcgaacactttttaagccgtagataaacaggctgggacacttcacatgagcgaaaaatacatcgtcacctgggacatgttgcagatccatgcacgtaaactcgcaagccgactgatgccttctgaacaatggaaaggcattattgccgtaagccgtggcggtctgtaccgggtgcgttactggcgcgtgaactgggtattcgtcatgtcgataccgtttgtatttccagctacgatcacgacaaccagcgcgagcttaaagtgctgaaacgcgcagaaggcgatggcgaaggcttcatcgttattgatgacctggtggataccggtggtactgcggttgcgattcgtgaaatgtatccaaaagcgcactttgtcaccatcttcgcaaaaccggctggtcgtccgctggttgatgactatgttgttgatatcccgcaagatacctggattgaacagccgtgggatatgggcgtcgtattcgtcccgccaatctccggtcgctaatcttttcaacgcctggcactgccgggcgttgttctttttaacttcaggcgggttacaatagtttccagtaagtattctggaggctgcatccatgacacaggcaaacctgagcgaaaccctgttcaaaccccgctttaaacatcctgaaacctcgacgctagtccgccgctttaatcacggcgcacaaccgcctgtgcagtcggcccttgatggtaaaaccatccctcactggtatcgcatgattaaccgtctgatgtggatctggcgcggcattgacccacgcgaaatcctcgacgtccaggcacgtattgtgatgagcgatgccgaacgtaccgacgatgatttatacgatacggtgattggctaccgtggcggcaactggatttatgagtgggccccggatctttgtgaaggaaccttacttctgtggtgtgacataattggacaaactacctacagagatttaaagctctaaggtaaatataaaatttttaagtgtataatgtgttaaactactgattctaattgtttgtgtattttagattccaacctatggaactgatgaatgggagcagtggtggaatgcctttaatgaggaaaacctgttttgctcagaagaaatgccatctagtgatgatgaggctactgctgactctcaacattctactcctccaaaaaagaagagaaaggtagaagaccccaaggactttccttcagaattgctaagttttttgagtcatgctgtgtttagtaatagaactcttgcttgctttgctatttacaccacaaaggaaaaagctgcactgctatacaagaaaattatggaaaaatattctgtaacctttataagtaggcataacagttataatcataacatactgttttttcttactccacacaggcatagagtgtctgctattaataactatgctcaaaaattgtgtacctttagctttttaatttgtaaaggggttaataaggaatatttgatgtatagtgccttgactagagatcataatcagccataccacatttgtagaggttttacttgctttaaaaaacctcccacacctccccctgaacctgaaacataaaatgaatgcaattgttgttgttaacttgtttattgcagcttataatggttacaaataaagcaatagcatcacaaatttcacaaataaagcatttttttcactgcattctagttgtggtttgtccaaactcatcaatgtatcttatcatgtctggatcaactggataactcaagctaaccaaaatcatcccaaacttcccaccccataccctattaccactgccaattacctagtggtttcatttactctaaacctgtgattcctctgaattattttcattttaaagaaattgtatttgttaaatatgtactacaaacttagtagttggaagggctaattcactcccaaagaagacaagatatccttgatctgtggatctaccacacacaaggctacttccctgattagcagaactacacaccagggccaggggtcagatatccactgacctttggatggtgctacaagctagtaccagttgagccagataaggtagaagaggccaataaaggagagaacaccagcttgttacaccctgtgagcctgcatgggatggatgacccggagagagaagtgttagagtggaggtttgacagccgcctagcatttcatcacgtggcccgagagctgcatccggagtacttcaagaactgctgatatcgagcttgctacaagggactttccgctggggactttccagggaggcgtggcctgggcgggactggggagtggcgagccctcagatcctgcatataagcagctgctttttgcctgtactgggtctctctggttagaccagatctgagcctgggagctctctggctaactagggaacccactgcttaagcctcaataaagcttgccttgagtgcttcaagtagtgtgtgcccgtctgttgtgtgactctggtaactagagatccctcagacccttttagtcagtgtggaaaatctctagcagtggcgcccgaacagggacttgaaagcgaaagggaaaccagaggagctctctcgacgcaggactcggcttgctgaagcgcgcacggcaagaggcgaggggcggcgactggtgagtacgccaaaaattttgactagcggaggctagaaggagagagatgggtgcgagagcgtcagtattaagcgggggagaattagatcgcgatgggaaaaaattcggttaaggccagggggaaagaaaaaatataaattaaaacatatagtatgggcaagcagggagctagaacgattcgcagttaatcctggcctgttagaaacatcagaaggctgtagacaaatactgggacagctacaaccatcccttcagacaggatcagaagaacttagatcattatataatacagtagcaaccctctattgtgtgcatcaaaggatagagataaaagacaccaaggaagctttagacaagatagaggaagagcaaaacaaaagtaagaccaccgcacagcaagcggccggccgctgatcttcagacctggaggaggagatatgagggacaattggagaagtgaattatataaatataaagtagtaaaaattgaaccattaggagtagcacccaccaaggcaaagagaagagtggtgcagagagaaaaaagagcagtgggaataggagctttgttccttgggttcttgggagcagcaggaagcactatgggcgcagcgtcaatgacgctgacggtacaggccagacaattattgtctggtatagtgcagcagcagaacaatttgctgagggctattgaggcgcaacagcatctgttgcaactcacagtctggggcatcaagcagctccaggcaagaatcctggctgtgaaagatacctaaaggatcaacagctcctggggatttggggttgctctggaaaactcatttgcaccactgctgtgccttggaatgctagttggagtaataaatctctggaacagatttggaatcacacgacctggatggagtgggacagagaaattaacaattacacaagcttaatacactccttaattgaagaatcgcaaaaccagcaagaaaagaatgaacaagaattattggaattagataaatgggcaagtttgtggaattggtttaacataacaaattggctgtggtatataaaattattcataatgatagtaggaggcttggtaggtttaagaatagtttttgctgtactttctatagtgaatagagttaggcagggatattcaccattatcgtttcagacccacctcccaaccccgaggggacccgacaggcccgaaggaatagaagaagaaggtggagagagagacagagacagatccattcgattagtgaacggatctcgacggtatcgccaaatggcagtattcatccacaattttaaaagaaaaggggggattggggggtacagtgcaggggaaagaatagtagacataatagcaacagacatacaaactaaagaattacaaaaacaaattacaaaaattcaaaattttcgggtttattacagggacagcagagatccagtttggatcgataagcttgatatcgaattcctgcagcccgtgaggctccggtgcccgtcagtgggcagagcgcacatcgcccacagtccccgagaagttggggggaggggtcggcaattgaaccggtgcctagagaaggtggcgcggggtaaactgggaaagtgatgtcgtgtactggctccgcctttttcccgagggtgggggagaaccgtatataagtgcagtagtcgccgtgaacgttctttttcgcaacgggtttgccgccagaacacaggtaagtgccgtgtgtggttcccgcgggcctggcctctttacgggttatggcccttgcgtgccttgaattacttccacctggctgcagtacgtgattcttgatcccgagcttcgggttggaagtgggtgggagagttcgaggccttgcgcttaaggagccccttcgcctcgtgcttgagttgaggcctggcctgggcgctggggccgccgcgtgcgaatctggtggcaccttcgcgcctgtctcgctgctttcgataagtctctagccatttaaaatttttgatgacctgctgcgacgctttttttctggcaagatagtcttgtaaatgcgggccaagatctgcacactggtatttcggtttttggggccgcgggcggcgacggggcccgtgcgtcccagcgcacatgttcggcgaggcggggcctgcgagcgcggccaccgagaatcggacgggggtagtctcaagctggccggcctgctctggtgcctggcctcgcgccgccgtgtatcgccccgccctgggcggcaaggctggcccggtcggcaccagttgcgtgagcggaaagatggccgcttcccggccctgctgcagggagctcaaaatggaggacgcggcgctcgggagagcgggcgggtgagtcacccacacaaaggaaaagggcctttccgtcctcagccgtcgcttcatgtgactccacggagtaccgggcgccgtccaggcacctcgattagttctcgagcttttggagtacgtcgtctttaggttggggggaggggttttatgcgatggagtttccccacactgagtgggtggagactgaagttaggccagcttggcacttgatgtaattctccttggaatttgccctttttgagtttggatcttggttcattctcaagcctcagacagtggttcaaagtttttttcttccatttcaggtgtcgtgaggggatctggagctctcgagaattctcacgcgtgccgccaccatgattcatcttggtcacatcctcttcttgctgctgttgccagttgctgccgcacaaacaaccccaggtgagaggtcaagtcttcccgccttctatccgggcacaagcgggagttgtagtgggtgtggatctttgtcccttcctatatacatctgggctcctctggctggcacttgcggagtgcttctgctgagtctggttattaccggttctgttgttattgttggtagaattattttatctggtagtggtagtatcacggcctactcccaacagacgcggggcctacttggttgcatcatcactagcctcacaggccgggacaagaaccaggtcgaaggggaggttcaagtggtttctaccgcaacacaatctttcctggcgacctgcgtcaacggcgtgtgctggactgtctaccatggcgctggctcgaagaccctagccggtccaaaaggtccaatcacccaaatgtacaccaatgtagaccaggacctcgtcggctggcaggcgcctccaggggcgcgctccttgacaccatgcacctgtggcagctcggacctttacttggtcacgagacatgctgatgtcattccggtgcgccggcgaggcgacagcaggggaagtctactctcccccaggcccgtctcctacctgaaaggctccgcaggtggtccattgctttgcccttcggggcacgctgtgggcatcttccgggctgctgtgtgcacccggggggtcgcgaaggcggtggacttcgtgcccgttgagtctatggaaactaccatgcggtctagagtgaagttcagcaggagcgcagacgcccccgcgtacaagcagggccagaaccagctctataacgagctcaatctaggacgaagagaggagtacgatgttttggacaagagacgtggccgggaccctgagatggggggaaagccgagaaggaagaaccctcaggaaggcctgtacaatgaactgcagaaagataagatggcggaggcctacagtgagattgggatgaaaggcgagcgccggaggggcaaggggcacgatggcctttaccagggtctcagtacagccaccaaggacacctacgacgcccttcacatgcaggccctgccccctcgcggcatggtgagcaagggcgaggaggataacatggccatcatcaaggagttcatgcgcttcaaggtgcacatggagggctccgtgaacggccacgagttcgagatcgagggcgagggcgagggccgcccctacgagggcacccagaccgccaagctgaaggtgaccaagggtggccccctgcccttcgcctgggacatcctgtcccctcagttcatgtacggctccaaggcctacgtgaagcaccccgccgacatccccgactacttgaagctgtccttccccgagggcttcaagtgggagcgcgtgatgaacttcgaggacggcggcgtggtgaccgtgacccaggactcctccctgcaggacggcgagttcatctacaaggtgaagctgcgcggcaccaacttcccctccgacggccccgtaatgcagaagaagaccatgggctgggaggcctcctccgagcggatgtaccccgaggacggcgccctgaagggcgagatcaagcagaggctgaagctgaaggacggcggccactacgacgctgaggtcaagaccacctacaaggccaagaagcccgtgcagctgcccggcgcctacaacgtcaacatcaagttggacatcacctcccacaacgaggactacaccatcgtggaacagtacgaacgcgccgagggccgccactccaccggcggcatggacgagctgtacaagtaagcggccgcgactctagagtcgacctgcaggcatgcaagcttgatatcaagcttatcgataatcaacctctggattacaaaatttgtgaaagattgactggtattcttaactatgttgctccttttacgctatgtggatacgctgctttaatgcctttgtatcatgctattgcttcccgtatggctttcattttctcctccttgtataaatcctggttgctgtctctttatgaggagttgtggcccgttgtcaggcaacgtggcgtggtgtgcactgtgtttgctgacgcaacccccactggttggggcattgccaccacctgtcagctcctttccgggactttcgctttccccctccctattgccacggcggaactcatcgccgcctgccttgcccgctgctggacaggggctcggctgttgggcactgacaattccgtggtgttgtcggggaaatcatcgtcctttccttggctgctcgcctgtgttgccacctggattctgcgcgggacgtccttctgctacgtcccttcggccctcaatccagcggaccttccttcccgcggcctgctgccggctctgcggcctcttccgcgtcttcgccttcgccctcagacgagtcggatctccctttgggccgcctccccgcat

SEQ ID NO: 243 - DNA, 11499 bp, Artificial Sequence
  synthetic vector
cgataccgtcgacctcgagggaattaattcgagctcggtacctttaagaccaatgacttacaaggcagctgtagatcttagccactttttaaaagaaaaggggggactggaagggctaattcactcccaacgaagacaagatctgctttttgcttgtactgggtctctctggttagaccagatctgagcctgggagctctctggctaactagggaacccactgcttaagcctcaataaagcttgccttgagtgcttcaagtagtgtgtgcccgtctgttgtgtgactctggtaactagagatccctcagacccttttagtcagtgtggaaaatctctagcagcatctagaattaattccgtgtattctatagtgtcacctaaatcgtatgtgtatgatacataaggttatgtattaattgtagccgcgttctaacgacaatatgtacaagcctaattgtgtagcatctggcttactgaagcagaccctatcatctctctcgtaaactgccgtcagagtcggtttggttggacgaaccttctgagtttctggtaacgccgtcccgcacccggaaatggtcagcgaaccaatcagcagggtcatcgctagccagatcctctacgccggacgcatcgtggccggcatcaccggcgccacaggtgcggttgctggcgcctatatcgccgacatcaccgatggggaagatcgggctcgccacttcgggctcatgagcgcttgtttcggcgtgggtatggtggcaggccccgtggccgggggactgttgggcgccatctccttgcatgcaccattccttgcggcggcggtgctcaacggcctcaacctactactgggctgcttcctaatgcaggagtcgcataagggagagcgtcgaatggtgcactctcagtacaatctgctctgatgccgcatagttaagccagccccgacacccgccaacacccgctgacgcgccctgacgggcttgtctgctcccggcatccgcttacagacaagctgtgaccgtctccgggagctgcatgtgtcagaggttttcaccgtcatcaccgaaacgcgcgagacgaaagggcctcgtgatacgcctatttttataggttaatgtcatgataataatggtttcttagacgtcaggtggcacttttcggggaaatgtgcgcggaacccctatttgtttatttttctaaatacattcaaatatgtatccgctcatgagacaataaccctgataaatgcttcaataatattgaaaaaggaagagtatgagtattcaacatttccgtgtcgcccttattcccttttttgcggcattttgccttcctgtttttgctcacccagaaacgctggtgaaagtaaaagatgctgaagatcagttgggtgcacgagtgggttacatcgaactggatctcaacagcggtaagatccttgagagttttcgccccgaagaacgttttccaatgatgagcacttttaaagttctgctatgtggcgcggtattatcccgtattgacgccgggcaagagcaactcggtcgccgcatacactattctcagaatgacttggttgagtactcaccagtcacagaaaagcatcttacggatggcatgacagtaagagaattatgcagtgctgccataaccatgagtgataacactgcggccaacttacttctgacaacgatcggaggaccgaaggagctaaccgcttttttgcacaacatgggggatcatgtaactcgccttgatcgttgggaaccggagctgaatgaagccataccaaacgacgagcgtgacaccacgatgcctgtagcaatggcaacaacgttgcgcaaactattaactggcgaactacttactctagcttcccggcaacaattaatagactggatggaggcggataaagttgcaggaccacttctgcgctcggcccttccggctggctggtttattgctgataaatctggagccggtgagcgtgggtctcgcggtatcattgcagcactggggccagatggtaagccctcccgtatcgtagttatctacacgacggggagtcaggcaactatggatgaacgaaatagacagatcgctgagataggtgcctcactgattaagcattggtaactgtcagaccaagtttactcatatatactttagattgatttaaaacttcatttttaatttaaaaggatctaggtgaagatcctttttgataatctcatgaccaaaatcccttaacgtgagttttcgttccactgagcgtcagaccccgtagaaaagatcaaaggatcttcttgagatcctttttttctgcgcgtaatctgctgcttgcaaacaaaaaaaccaccgctaccagcggtggtttgtttgccggatcaagagctaccaactctttttccgaaggtaactggcttcagcagagcgcagataccaaatactgtctttctagtgtagccgtagttaggccaccacttcaagaactctgtagcaccgcctacatacctcgctctgctaatcctgttaccagtggctgctgccagtggcgataagtcgtgtcttaccgggttggactcaagacgatagttaccggataaggcgcagcggtcgggctgaacggggggttcgtgcacacagcccagcttggagcgaacgacctacaccgaactgagatacctacagcgtgagctatgagaaagcgccacgcttcccgaagggagaaaggcggacaggtatccggtaagcggcagggtcggaacaggagagcgcacgagggagcttccagggggaaacgcctggtatctttatagtcctgtcgggtttcgccacctctgacttgagcgtcgatttttgtgatgctcgtcaggggggcggagcctatggaaaaacgccagcaacgcggcctttttacggttcctggccttttgctggccttttgctcacatgttctttcctgcgttatcccctgattctgtggataaccgtattaccgcctttgagtgagctgataccgctcgccgcagccgaacgaccgagcgcagcgagtcagtgagcgaggaagcggaagagcgcccaatacgcaaaccgcctctccccgcgcgttggccgattcattaatgcagctgtggaatgtgtgtcagttagggtgtggaaagtccccaggctccccagcaggcagaagtatgcaaagcatgcatctcaattagtcagcaaccaggtgtggaaagtccccaggctccccagcaggcagaagtatgcaaagcatgcatctcaattagtcagcaaccatagtcccgcccctaactccgcccatcccgcccctaactccgcccagttccgcccattctccgccccatggctgactaattttttttatttatgcagaggccgaggccgcctcggcctctgagctattccagaagtagtgaggaggcttttttggaggcctaggcttttgcaaaaagcttggacacaagacaggcttgcgagatatgtttgagaataccactttatcccgcgtcagggagaggcagtgcgtaaaaagacgcggactcatgtgaaatactggtttttagtgcgccagatctctataatctcgcgcaacctattttcccctcgaacactttttaagccgtagataaacaggctgggacacttcacatgagcgaaaaatacatcgtcacctgggacatgttgcagatccatgcacgtaaactcgcaagccgactgatgccttctgaacaatggaaaggcattattgccgtaagccgtggcggtctgtaccgggtgcgttactggcgcgtgaactgggtattcgtcatgtcgataccgtttgtatttccagctacgatcacgacaaccagcgcgagcttaaagtgctgaaacgcgcagaaggcgatggcgaaggcttcatcgttattgatgacctggtggataccggtggtactgcggttgcgattcgtgaaatgtatccaaaagcgcactttgtcaccatcttcgcaaaaccggctggtcgtccgctggttgatgactatgttgttgatatcccgcaagatacctggattgaacagccgtgggatatgggcgtcgtattcgtcccgccaatctccggtcgctaatcttttcaacgcctggcactgccgggcgttgttctttttaacttcaggcgggttacaatagtttccagtaagtattctggaggctgcatccatgacacaggcaaacctgagcgaaaccctgttcaaaccccgctttaaacatcctgaaacctcgacgctagtccgccgctttaatcacggcgcacaaccgcctgtgcagtcggcccttgatggtaaaaccatccctcactggtatcgcatgattaaccgtctgatgtggatctggcgcggcattgacccacgcgaaatcctcgacgtccaggcacgtattgtgatgagcgatgccgaacgtaccgacgatgatttatacgatacggtgattggctaccgtggcggcaactggatttatgagtgggccccggatctttgtgaaggaaccttacttctgtggtgtgacataattggacaaactacctacagagatttaaagctctaaggtaaatataaaatttttaagtgtataatgtgttaaactactgattctaattgtttgtgtattttagattccaacctatggaactgatgaatgggagcagtggtggaatgcctttaatgaggaaaacctgttttgctcagaagaaatgccatctagtgatgatgaggctactgctgactctcaacattctactcctccaaaaaagaagagaaaggtagaagaccccaaggactttccttcagaattgctaagttttttgagtcatgctgtgtttagtaatagaactcttgcttgctttgctatttacaccacaaaggaaaaagctgcactgctatacaagaaaattatggaaaaatattctgtaacctttataagtaggcataacagttataatcataacatactgttttttcttactccacacaggcatagagtgtctgctattaataactatgctcaaaaattgtgtacctttagctttttaatttgtaaaggggttaataaggaatatttgatgtatagtgccttgactagagatcataatcagccataccacatttgtagaggttttacttgctttaaaaaacctcccacacctccccctgaacctgaaacataaaatgaatgcaattgttgttgttaacttgtttattgcagcttataatggttacaaataaagcaatagcatcacaaatttcacaaataaagcatttttttcactgcattctagttgtggtttgtccaaactcatcaatgtatcttatcatgtctggatcaactggataactcaagctaaccaaaatcatcccaaacttcccaccccataccctattaccactgccaattacctagtggtttcatttactctaaacctgtgattcctctgaattattttcattttaaagaaattgtatttgttaaatatgtactacaaacttagtagttggaagggctaattcactcccaaagaagacaagatatccttgatctgtggatctaccacacacaaggctacttccctgattagcagaactacacaccagggccaggggtcagatatccactgacctttggatggtgctacaagctagtaccagttgagccagataaggtagaagaggccaataaaggagagaacaccagcttgttacaccctgtgagcctgcatgggatggatgacccggagagagaagtgttagagtggaggtttgacagccgcctagcatttcatcacgtggcccgagagctgcatccggagtacttcaagaactgctgatatcgagcttgctacaagggactttccgctggggactttccagggaggcgtggcctgggcgggactggggagtggcgagccctcagatcctgcatataagcagctgctttttgcctgtactgggtctctctggttagaccagatctgagcctgggagctctctggctaactagggaacccactgcttaagcctcaataaagcttgccttgagtgcttcaagtagtgtgtgcccgtctgttgtgtgactctggtaactagagatccctcagacccttttagtcagtgtggaaaatctctagcagtggcgcccgaacagggacttgaaagcgaaagggaaaccagaggagctctctcgacgcaggactcggcttgctgaagcgcgcacggcaagaggcgaggggcggcgactggtgagtacgccaaaaattttgactagcggaggctagaaggagagagatgggtgcgagagcgtcagtattaagcgggggagaattagatcgcgatgggaaaaaattcggttaaggccagggggaaagaaaaaatataaattaaaacatatagtatgggcaagcagggagctagaacgattcgcagttaatcctggcctgttagaaacatcagaaggctgtagacaaatactgggacagctacaaccatcccttcagacaggatcagaagaacttagatcattatataatacagtagcaaccctctattgtgtgcatcaaaggatagagataaaagacaccaaggaagctttagacaagatagaggaagagcaaaacaaaagtaagaccaccgcacagcaagcggccggccgctgatcttcagacctggaggaggagatatgagggacaattggagaagtgaattatataaatataaagtagtaaaaattgaaccattaggagtagcacccaccaaggcaaagagaagagtggtgcagagagaaaaaagagcagtgggaataggagctttgttccttgggttcttgggagcagcaggaagcactatgggcgcagcgtcaatgacgctgacggtacaggccagacaattattgtctggtatagtgcagcagcagaacaatttgctgagggctattgaggcgcaacagcatctgttgcaactcacagtctggggcatcaagcagctccaggcaagaatcctggctgtgaaagatacctaaaggatcaacagctcctggggatttggggttgctctggaaaactcatttgcaccactgctgtgccttggaatgctagttggagtaataaatctctggaacagatttggaatcacacgacctggatggagtgggacagagaaattaacaattacacaagcttaatacactccttaattgaagaatcgcaaaaccagcaagaaaagaatgaacaagaattattggaattagataaatgggcaagtttgtggaattggtttaacataacaaattggctgtggtatataaaattattcataatgatagtaggaggcttggtaggtttaagaatagtttttgctgtactttctatagtgaatagagttaggcagggatattcaccattatcgtttcagacccacctcccaaccccgaggggacccgacaggcccgaaggaatagaagaagaaggtggagagagagacagagacagatccattcgattagtgaacggatctcgacggtatcgccaaatggcagtattcatccacaattttaaaagaaaaggggggattggggggtacagtgcaggggaaagaatagtagacataatagcaacagacatacaaactaaagaattacaaaaacaaattacaaaaattcaaaattttcgggtttattacagggacagcagagatccagtttggatcgataagcttgatatcgaattcctgcagcccgtgaggctccggtgcccgtcagtgggcagagcgcacatcgcccacagtccccgagaagttggggggaggggtcggcaattgaaccggtgcctagagaaggtggcgcggggtaaactgggaaagtgatgtcgtgtactggctccgcctttttcccgagggtgggggagaaccgtatataagtgcagtagtcgccgtgaacgttctttttcgcaacgggtttgccgccagaacacaggtaagtgccgtgtgtggttcccgcgggcctggcctctttacgggttatggcccttgcgtgccttgaattacttccacctggctgcagtacgtgattcttgatcccgagcttcgggttggaagtgggtgggagagttcgaggccttgcgcttaaggagccccttcgcctcgtgcttgagttgaggcctggcctgggcgctggggccgccgcgtgcgaatctggtggcaccttcgcgcctgtctcgctgctttcgataagtctctagccatttaaaatttttgatgacctgctgcgacgctttttttctggcaagatagtcttgtaaatgcgggccaagatctgcacactggtatttcggtttttggggccgcgggcggcgacggggcccgtgcgtcccagcgcacatgttcggcgaggcggggcctgcgagcgcggccaccgagaatcggacgggggtagtctcaagctggccggcctgctctggtgcctggcctcgcgccgccgtgtatcgccccgccctgggcggcaaggctggcccggtcggcaccagttgcgtgagcggaaagatggccgcttcccggccctgctgcagggagctcaaaatggaggacgcggcgctcgggagagcgggcgggtgagtcacccacacaaaggaaaagggcctttccgtcctcagccgtcgcttcatgtgactccacggagtaccgggcgccgtccaggcacctcgattagttctcgagcttttggagtacgtcgtctttaggttggggggaggggttttatgcgatggagtttccccacactgagtgggtggagactgaagttaggccagcttggcacttgatgtaattctccttggaatttgccctttttgagtttggatcttggttcattctcaagcctcagacagtggttcaaagtttttttcttccatttcaggtgtcgtgaggggatctggagctctcgagaattctcacgcgtgccgccaccatgattcatcttggtcacatcctcttcttgctgctgttgccagttgctgccgcacaaacaaccccaggtgagaggtcaagtcttcccgccttctatccgggcacaagcgggagttgtagtgggtgtggatctttgtcccttcctatatacatctgggctcctctggctggcacttgcggagtgcttctgctgagtctggttattaccagagtgaagttcagcaggagcgcagacgcccccgcgtacaagcagggccagaaccagctctataacgagctcaatctaggacgaagagaggagtacgatgttttggacaagagacgtggccgggaccctgagatggggggaaagccgagaaggaagaaccctcaggaaggcctgtacaatgaactgcagaaagataagatggcggaggcctacagtgagattgggatgaaaggcgagcgccggaggggcaaggggcacgatggcctttaccagggtctcagtacagccaccaaggacacctacgacgcccttcacatgcaggccctgccccctcgcggttctgttgttattgttggtagaattattttatctggtagtggtagtatcacggcctactcccaacagacgcggggcctacttggttgcatcatcactagcctcacaggccgggacaagaaccaggtcgaaggggaggttcaagtggtttctaccgcaacacaatctttcctggcgacctgcgtcaacggcgtgtgctggactgtctaccatggcgctggctcgaagaccctagccggtccaaaaggtccaatcacccaaatgtacaccaatgtagaccaggacctcgtcggctggcaggcgcctccaggggcgcgctccttgacaccatgcacctgtggcagctcggacctttacttggtcacgagacatgctgatgtcattccggtgcgccggcgaggcgacagcaggggaagtctactctcccccaggcccgtctcctacctgaaaggctccgcaggtggtccattgctttgcccttcggggcacgctgtgggcatcttccgggctgctgtgtgcacccggggggtcgcgaaggcggtggacttcgtgcccgttgagtctatggaaactaccatgcggtctggcatggtgagcaagggcgaggaggataacatggccatcatcaaggagttcatgcgcttcaaggtgcacatggagggctccgtgaacggccacgagttcgagatcgagggcgagggcgagggccgcccctacgagggcacccagaccgccaagctgaaggtgaccaagggtggccccctgcccttcgcctgggacatcctgtcccctcagttcatgtacggctccaaggcctacgtgaagcaccccgccgacatccccgactacttgaagctgtccttccccgagggcttcaagtgggagcgcgtgatgaacttcgaggacggcggcgtggtgaccgtgacccaggactcctccctgcaggacggcgagttcatctacaaggtgaagctgcgcggcaccaacttcccctccgacggccccgtaatgcagaagaagaccatgggctgggaggcctcctccgagcggatgtaccccgaggacggcgccctgaagggcgagatcaagcagaggctgaagctgaaggacggcggccactacgacgctgaggtcaagaccacctacaaggccaagaagcccgtgcagctgcccggcgcctacaacgtcaacatcaagttggacatcacctcccacaacgaggactacaccatcgtggaacagtacgaacgcgccgagggccgccactccaccggcggcatggacgagctgtacaagtaagcggccgcgactctagagtcgacctgcaggcatgcaagcttgatatcaagcttatcgataatcaacctctggattacaaaatttgtgaaagattgactggtattcttaactatgttgctccttttacgctatgtggatacgctgctttaatgcctttgtatcatgctattgcttcccgtatggctttcattttctcctccttgtataaatcctggttgctgtctctttatgaggagttgtggcccgttgtcaggcaacgtggcgtggtgtgcactgtgtttgctgacgcaacccccactggttggggcattgccaccacctgtcagctcctttccgggactttcgctttccccctccctattgccacggcggaactcatcgccgcctgccttgcccgctgctggacaggggctcggctgttgggcactgacaattccgtggtgttgtcggggaaatcatcgtcctttccttggctgctcgcctgtgttgccacctggattctgcgcgggacgtccttctgctacgtcccttcggccctcaatccagcggaccttccttcccgcggcctgctgccggctctgcggcctcttccgcgtcttcgccttcgccctcagacgagtcggatctccctttgggccgcctccccgcat

SEQ ID NO: 244 - DNA, 13602 bp, Artificial Sequence
  synthetic vector
cgataccgtcgacctcgagggaattaattcgagctcggtacctttaagaccaatgacttacaaggcagctgtagatcttagccactttttaaaagaaaaggggggactggaagggctaattcactcccaacgaagacaagatctgctttttgcttgtactgggtctctctggttagaccagatctgagcctgggagctctctggctaactagggaacccactgcttaagcctcaataaagcttgccttgagtgcttcaagtagtgtgtgcccgtctgttgtgtgactctggtaactagagatccctcagacccttttagtcagtgtggaaaatctctagcagcatctagaattaattccgtgtattctatagtgtcacctaaatcgtatgtgtatgatacataaggttatgtattaattgtagccgcgttctaacgacaatatgtacaagcctaattgtgtagcatctggcttactgaagcagaccctatcatctctctcgtaaactgccgtcagagtcggtttggttggacgaaccttctgagtttctggtaacgccgtcccgcacccggaaatggtcagcgaaccaatcagcagggtcatcgctagccagatcctctacgccggacgcatcgtggccggcatcaccggcgccacaggtgcggttgctggcgcctatatcgccgacatcaccgatggggaagatcgggctcgccacttcgggctcatgagcgcttgtttcggcgtgggtatggtggcaggccccgtggccgggggactgttgggcgccatctccttgcatgcaccattccttgcggcggcggtgctcaacggcctcaacctactactgggctgcttcctaatgcaggagtcgcataagggagagcgtcgaatggtgcactctcagtacaatctgctctgatgccgcatagttaagccagccccgacacccgccaacacccgctgacgcgccctgacgggcttgtctgctcccggcatccgcttacagacaagctgtgaccgtctccgggagctgcatgtgtcagaggttttcaccgtcatcaccgaaacgcgcgagacgaaagggcctcgtgatacgcctatttttataggttaatgtcatgataataatggtttcttagacgtcaggtggcacttttcggggaaatgtgcgcggaacccctatttgtttatttttctaaatacattcaaatatgtatccgctcatgagacaataaccctgataaatgcttcaataatattgaaaaaggaagagtatgagtattcaacatttccgtgtcgcccttattcccttttttgcggcattttgccttcctgtttttgctcacccagaaacgctggtgaaagtaaaagatgctgaagatcagttgggtgcacgagtgggttacatcgaactggatctcaacagcggtaagatccttgagagttttcgccccgaagaacgttttccaatgatgagcacttttaaagttctgctatgtggcgcggtattatcccgtattgacgccgggcaagagcaactcggtcgccgcatacactattctcagaatgacttggttgagtactcaccagtcacagaaaagcatcttacggatggcatgacagtaagagaattatgcagtgctgccataaccatgagtgataacactgcggccaacttacttctgacaacgatcggaggaccgaaggagctaaccgcttttttgcacaacatgggggatcatgtaactcgccttgatcgttgggaaccggagctgaatgaagccataccaaacgacgagcgtgacaccacgatgcctgtagcaatggcaacaacgttgcgcaaactattaactggcgaactacttactctagcttcccggcaacaattaatagactggatggaggcggataaagttgcaggaccacttctgcgctcggcccttccggctggctggtttattgctgataaatctggagccggtgagcgtgggtctcgcggtatcattgcagcactggggccagatggtaagccctcccgtatcgtagttatctacacgacggggagtcaggcaactatggatgaacgaaatagacagatcgctgagataggtgcctcactgattaagcattggtaactgtcagaccaagtttactcatatatactttagattgatttaaaacttcatttttaatttaaaaggatctaggtgaagatcctttttgataatctcatgaccaaaatcccttaacgtgagttttcgttccactgagcgtcagaccccgtagaaaagatcaaaggatcttcttgagatcctttttttctgcgcgtaatctgctgcttgcaaacaaaaaaaccaccgctaccagcggtggtttgtttgccggatcaagagctaccaactctttttccgaaggtaactggcttcagcagagcgcagataccaaatactgtctttctagtgtagccgtagttaggccaccacttcaagaactctgtagcaccgcctacatacctcgctctgctaatcctgttaccagtggctgctgccagtggcgataagtcgtgtcttaccgggttggactcaagacgatagttaccggataaggcgcagcggtcgggctgaacggggggttcgtgcacacagcccagcttggagcgaacgacctacaccgaactgagatacctacagcgtgagctatgagaaagcgccacgcttcccgaagggagaaaggcggacaggtatccggtaagcggcagggtcggaacaggagagcgcacgagggagcttccagggggaaacgcctggtatctttatagtcctgtcgggtttcgccacctctgacttgagcgtcgatttttgtgatgctcgtcaggggggcggagcctatggaaaaacgccagcaacgcggcctttttacggttcctggccttttgctggccttttgctcacatgttctttcctgcgttatcccctgattctgtggataaccgtattaccgcctttgagtgagctgataccgctcgccgcagccgaacgaccgagcgcagcgagtcagtgagcgaggaagcggaagagcgcccaatacgcaaaccgcctctccccgcgcgttggccgattcattaatgcagctgtggaatgtgtgtcagttagggtgtggaaagtccccaggctccccagcaggcagaagtatgcaaagcatgcatctcaattagtcagcaaccaggtgtggaaagtccccaggctccccagcaggcagaagtatgcaaagcatgcatctcaattagtcagcaaccatagtcccgcccctaactccgcccatcccgcccctaactccgcccagttccgcccattctccgccccatggctgactaattttttttatttatgcagaggccgaggccgcctcggcctctgagctattccagaagtagtgaggaggcttttttggaggcctaggcttttgcaaaaagcttggacacaagacaggcttgcgagatatgtttgagaataccactttatcccgcgtcagggagaggcagtgcgtaaaaagacgcggactcatgtgaaatactggtttttagtgcgccagatctctataatctcgcgcaacctattttcccctcgaacactttttaagccgtagataaacaggctgggacacttcacatgagcgaaaaatacatcgtcacctgggacatgttgcagatccatgcacgtaaactcgcaagccgactgatgccttctgaacaatggaaaggcattattgccgtaagccgtggcggtctgtaccgggtgcgttactggcgcgtgaactgggtattcgtcatgtcgataccgtttgtatttccagctacgatcacgacaaccagcgcgagcttaaagtgctgaaacgcgcagaaggcgatggcgaaggcttcatcgttattgatgacctggtggataccggtggtactgcggttgcgattcgtgaaatgtatccaaaagcgcactttgtcaccatcttcgcaaaaccggctggtcgtccgctggttgatgactatgttgttgatatcccgcaagatacctggattgaacagccgtgggatatgggcgtcgtattcgtcccgccaatctccggtcgctaatcttttcaacgcctggcactgccgggcgttgttctttttaacttcaggcgggttacaatagtttccagtaagtattctggaggctgcatccatgacacaggcaaacctgagcgaaaccctgttcaaaccccgctttaaacatcctgaaacctcgacgctagtccgccgctttaatcacggcgcacaaccgcctgtgcagtcggcccttgatggtaaaaccatccctcactggtatcgcatgattaaccgtctgatgtggatctggcgcggcattgacccacgcgaaatcctcgacgtccaggcacgtattgtgatgagcgatgccgaacgtaccgacgatgatttatacgatacggtgattggctaccgtggcggcaactggatttatgagtgggccccggatctttgtgaaggaaccttacttctgtggtgtgacataattggacaaactacctacagagatttaaagctctaaggtaaatataaaatttttaagtgtataatgtgttaaactactgattctaattgtttgtgtattttagattccaacctatggaactgatgaatgggagcagtggtggaatgcctttaatgaggaaaacctgttttgctcagaagaaatgccatctagtgatgatgaggctactgctgactctcaacattctactcctccaaaaaagaagagaaaggtagaagaccccaaggactttccttcagaattgctaagttttttgagtcatgctgtgtttagtaatagaactcttgcttgctttgctatttacaccacaaaggaaaaagctgcactgctatacaagaaaattatggaaaaatattctgtaacctttataagtaggcataacagttataatcataacatactgttttttcttactccacacaggcatagagtgtctgctattaataactatgctcaaaaattgtgtacctttagctttttaatttgtaaaggggttaataaggaatatttgatgtatagtgccttgactagagatcataatcagccataccacatttgtagaggttttacttgctttaaaaaacctcccacacctccccctgaacctgaaacataaaatgaatgcaattgttgttgttaacttgtttattgcagcttataatggttacaaataaagcaatagcatcacaaatttcacaaataaagcatttttttcactgcattctagttgtggtttgtccaaactcatcaatgtatcttatcatgtctggatcaactggataactcaagctaaccaaaatcatcccaaacttcccaccccataccctattaccactgccaattacctagtggtttcatttactctaaacctgtgattcctctgaattattttcattttaaagaaattgtatttgttaaatatgtactacaaacttagtagttggaagggctaattcactcccaaagaagacaagatatccttgatctgtggatctaccacacacaaggctacttccctgattagcagaactacacaccagggccaggggtcagatatccactgacctttggatggtgctacaagctagtaccagttgagccagataaggtagaagaggccaataaaggagagaacaccagcttgttacaccctgtgagcctgcatgggatggatgacccggagagagaagtgttagagtggaggtttgacagccgcctagcatttcatcacgtggcccgagagctgcatccggagtacttcaagaactgctgatatcgagcttgctacaagggactttccgctggggactttccagggaggcgtggcctgggcgggactggggagtggcgagccctcagatcctgcatataagcagctgctttttgcctgtactgggtctctctggttagaccagatctgagcctgggagctctctggctaactagggaacccactgcttaagcctcaataaagcttgccttgagtgcttcaagtagtgtgtgcccgtctgttgtgtgactctggtaactagagatccctcagacccttttagtcagtgtggaaaatctctagcagtggcgcccgaacagggacttgaaagcgaaagggaaaccagaggagctctctcgacgcaggactcggcttgctgaagcgcgcacggcaagaggcgaggggcggcgactggtgagtacgccaaaaattttgactagcggaggctagaaggagagagatgggtgcgagagcgtcagtattaagcgggggagaattagatcgcgatgggaaaaaattcggttaaggccagggggaaagaaaaaatataaattaaaacatatagtatgggcaagcagggagctagaacgattcgcagttaatcctggcctgttagaaacatcagaaggctgtagacaaatactgggacagctacaaccatcccttcagacaggatcagaagaacttagatcattatataatacagtagcaaccctctattgtgtgcatcaaaggatagagataaaagacaccaaggaagctttagacaagatagaggaagagcaaaacaaaagtaagaccaccgcacagcaagcggccggccgctgatcttcagacctggaggaggagatatgagggacaattggagaagtgaattatataaatataaagtagtaaaaattgaaccattaggagtagcacccaccaaggcaaagagaagagtggtgcagagagaaaaaagagcagtgggaataggagctttgttccttgggttcttgggagcagcaggaagcactatgggcgcagcgtcaatgacgctgacggtacaggccagacaattattgtctggtatagtgcagcagcagaacaatttgctgagggctattgaggcgcaacagcatctgttgcaactcacagtctggggcatcaagcagctccaggcaagaatcctggctgtgaaagatacctaaaggatcaacagctcctggggatttggggttgctctggaaaactcatttgcaccactgctgtgccttggaatgctagttggagtaataaatctctggaacagatttggaatcacacgacctggatggagtgggacagagaaattaacaattacacaagcttaatacactccttaattgaagaatcgcaaaaccagcaagaaaagaatgaacaagaattattggaattagataaatgggcaagtttgtggaattggtttaacataacaaattggctgtggtatataaaattattcataatgatagtaggaggcttggtaggtttaagaatagtttttgctgtactttctatagtgaatagagttaggcagggatattcaccattatcgtttcagacccacctcccaaccccgaggggacccgacaggcccgaaggaatagaagaagaaggtggagagagagacagagacagatccattcgattagtgaacggatctcgacggtatcgccaaatggcagtattcatccacaattttaaaagaaaaggggggattggggggtacagtgcaggggaaagaatagtagacataatagcaacagacatacaaactaaagaattacaaaaacaaattacaaaaattcaaaattttcgggtttattacagggacagcagagatccagtttggatcgataagcttgatatcgaattcctgcagcccgtgaggctccggtgcccgtcagtgggcagagcgcacatcgcccacagtccccgagaagttggggggaggggtcggcaattgaaccggtgcctagagaaggtggcgcggggtaaactgggaaagtgatgtcgtgtactggctccgcctttttcccgagggtgggggagaaccgtatataagtgcagtagtcgccgtgaacgttctttttcgcaacgggtttgccgccagaacacaggtaagtgccgtgtgtggttcccgcgggcctggcctctttacgggttatggcccttgcgtgccttgaattacttccacctggctgcagtacgtgattcttgatcccgagcttcgggttggaagtgggtgggagagttcgaggccttgcgcttaaggagccccttcgcctcgtgcttgagttgaggcctggcctgggcgctggggccgccgcgtgcgaatctggtggcaccttcgcgcctgtctcgctgctttcgataagtctctagccatttaaaatttttgatgacctgctgcgacgctttttttctggcaagatagtcttgtaaatgcgggccaagatctgcacactggtatttcggtttttggggccgcgggcggcgacggggcccgtgcgtcccagcgcacatgttcggcgaggcggggcctgcgagcgcggccaccgagaatcggacgggggtagtctcaagctggccggcctgctctggtgcctggcctcgcgccgccgtgtatcgccccgccctgggcggcaaggctggcccggtcggcaccagttgcgtgagcggaaagatggccgcttcccggccctgctgcagggagctcaaaatggaggacgcggcgctcgggagagcgggcgggtgagtcacccacacaaaggaaaagggcctttccgtcctcagccgtcgcttcatgtgactccacggagtaccgggcgccgtccaggcacctcgattagttctcgagcttttggagtacgtcgtctttaggttggggggaggggttttatgcgatggagtttccccacactgagtgggtggagactgaagttaggccagcttggcacttgatgtaattctccttggaatttgccctttttgagtttggatcttggttcattctcaagcctcagacagtggttcaaagtttttttcttccatttcaggtgtcgtgaggggatctggagctctcgagaattctcacgcgtgccgccaccatggccttaccagtgaccgccttgctcctgccgctggccttgctgctccacgccgccaggccggacatccagatgacacagactacatcctccctgtctgcctctctgggagacagagtcaccatcagttgcagggcaagtcaggacattagtaaatatttaaattggtatcagcagaaaccagatggaactgttaaactcctgatctaccatacatcaagattacactcaggagtcccatcaaggttcagtggcagtgggtctggaacagattattctctcaccattagcaacctggagcaagaagatattgccacttacttttgccaacagggtaatacgcttccgtacacgttcggaggcggcaccaagctggagatcacaggtggcggtggctcgggcggtggtgggtcgggtggcggcggatctgaggtgaaactgcaggagtcaggacctggcctggtggcgccctcacagagcctgtccgtcacatgcactgtctcaggggtctcattacccgactatggtgtaagctggattcgccagcctccacgaaagggtctggagtggctgggagtaatatggggtagtgaaaccacatactataattcagctctcaaatccagactgaccatcatcaaggacaactccaagagccaagttttcttaaaaatgaacagtctgcaaactgatgacacagccatttactactgtgccaaacattattactacggtggtagctatgctatggactactggggccaaggaacctcagtcaccgtctcctcagggaagcctatcccgaaccctctgttgggtctcgatagtaccaatggggccgcaaccacgacgccagcgccgcgaccaccaacaccggcgcccaccatcgcgttgcagcccctgtccctgcgcccagaggcgtgccggccagcggcggggggcgcagtgcacacgagggggctggacttcgcctgtgatttttgggtgctggtggtggttggtggagtcctggcttgctatagcttgctagtaacagtggcctttattattttctgggtgaggagtaagaggagcaggctcctgcacagtgactacatgaacatgactccccgccgccccgggcccacccgcaagcattaccagccctatgccccaccacgcgacttcgcagcctatcgctccggctcaggaagctcttccgacgaagaagaagcgcgcgagctgatcgagcgtgcgaaggaggctgcggaacgcgcgcaagaagctgctgagcgtaccggtgatccgcgcgtgcgtgaactcgctcgtgagctgaaacgcctggctcaggaagctgctgaagaagtgaagcgtgacccgtcttcctccgatgtgaacgaagcgctcaaactcatcgtggaagctatcgaggcggctgtggacgcgctcgaagcggctgaacgcaccggcgacccggaggttcgtgagctggcgcgtgagctcgtgcgcctcgcggttgaggctgcggaggaggtgcaacgtaacccatcctcctctgacgtgaatgaggctctccacagcatagtttacgctattgaagctgccatttttgcattggaagctgccgaaaggactggtgacccggaagtgagagaactcgcccgagagcttgtaagactggcggttgaggcggctgaagaagtccagcgaaatccgtccagccggaatgtcgagcacgcactgatgaggattgtgttggccatttacctggcagaagaaaatctccgcgaagctgaggagtctggcgatccggaaaaacgtgaaaaggctcgcgaacgtgttcgtgaggcggtggaacgtgcggaagaggttcagcgtgatccatccggttggctgaatcatggcagtggagagggcagaggaagtctgctaacatgcggtgacgtcgaggagaatcctggcccaatgattcatcttggtcacatcctcttcttgctgctgttgccagttgctgccgcacaaacaaccccaggtgagaggtcaagtcttcccgccttctatccgggcacaagcgggagttgtagtgggtgtggatctttgtcccttcctatatacatctgggctcctctggctggcacttgcggagtgcttctgctgagtctggttattaccaaacggggcagaaagaaactcctgtatatattcaaacaaccatttatgagaccagtacaaactactcaagaggaagatggctgtagctgccgatttccagaagaagaagaaggaggatgtgaactgggctgcgtggtcatagtgggcaggatcgtcttgtccggatccggcactagtgcgcccatcacggcgtacgcccagcagacgagaggcctcctagggtgtataatcaccagcctgactggccgggacaaaaaccaagtggagggtgaggtccagatcgtgtcaactgctacccaaaccttcctggcaacgtgcatcaatggggtatgctgggcagtctaccacggggccggaacgaggaccatcgcatcacccaagggtcctgtcatccagatgtataccaatgtggaccaagaccttgtgggctggcccgctcctcaaggttcccgctcattgacaccctgtacctgcggctcctcggacctttacctggtcacgaggcacgccgatgtcattcccgtgcgccggcgaggtgatagcaggggtagcctgctttcgccccggcccatttcctacttgaaaggctccgcggggggtccgctgttgtgccccgcgggacacgccgtgggcctattcagggccgcggtgtgcacccgtggagtggctaaagcggtggactttatccctgtggagaacctagagacaaccatgagatccccggtgttcacggacaactcctctagagtgaagttcagcaggagcgcagacgcccccgcgtacaagcagggccagaaccagctctataacgagctcaatctaggacgaagagaggagtacgatgttttggacaagagacgtggccgggaccctgagatggggggaaagccgagaaggaagaaccctcaggaaggcctgtacaatgaactgcagaaagataagatggcggaggcctacagtgagattgggatgaaaggcgagcgccggaggggcaaggggcacgatggcctttaccagggtctcagtacagccaccaaggacacctacgacgcccttcacatgcaggccctgccccctcgcggcatggtgagcaagggcgaggaggataacatggccatcatcaaggagttcatgcgcttcaaggtgcacatggagggctccgtgaacggccacgagttcgagatcgagggcgagggcgagggccgcccctacgagggcacccagaccgccaagctgaaggtgaccaagggtggccccctgcccttcgcctgggacatcctgtcccctcagttcatgtacggctccaaggcctacgtgaagcaccccgccgacatccccgactacttgaagctgtccttccccgagggcttcaagtgggagcgcgtgatgaacttcgaggacggcggcgtggtgaccgtgacccaggactcctccctgcaggacggcgagttcatctacaaggtgaagctgcgcggcaccaacttcccctccgacggccccgtaatgcagaagaagaccatgggctgggaggcctcctccgagcggatgtaccccgaggacggcgccctgaagggcgagatcaagcagaggctgaagctgaaggacggcggccactacgacgctgaggtcaagaccacctacaaggccaagaagcccgtgcagctgcccggcgcctacaacgtcaacatcaagttggacatcacctcccacaacgaggactacaccatcgtggaacagtacgaacgcgccgagggccgccactccaccggcggcatggacgagctgtacaagtaagcggccgcgactctagagtcgacctgcaggcatgcaagcttgatatcaagcttatcgataatcaacctctggattacaaaatttgtgaaagattgactggtattcttaactatgttgctccttttacgctatgtggatacgctgctttaatgcctttgtatcatgctattgcttcccgtatggctttcattttctcctccttgtataaatcctggttgctgtctctttatgaggagttgtggcccgttgtcaggcaacgtggcgtggtgtgcactgtgtttgctgacgcaacccccactggttggggcattgccaccacctgtcagctcctttccgggactttcgctttccccctccctattgccacggcggaactcatcgccgcctgccttgcccgctgctggacaggggctcggctgttgggcactgacaattccgtggtgttgtcggggaaatcatcgtcctttccttggctgctcgcctgtgttgccacctggattctgcgcgggacgtccttctgctacgtcccttcggccctcaatccagcggaccttccttcccgcggcctgctgccggctctgcggcctcttccgcgtcttcgccttcgccctcagacgagtcggatctccctttgggccgcctccccgcat

SEQ ID NO: 245 - DNA, 13572 bp, Artificial Sequence
  synthetic vector
cgataccgtcgacctcgagggaattaattcgagctcggtacctttaagaccaatgacttacaaggcagctgtagatcttagccactttttaaaagaaaaggggggactggaagggctaattcactcccaacgaagacaagatctgctttttgcttgtactgggtctctctggttagaccagatctgagcctgggagctctctggctaactagggaacccactgcttaagcctcaataaagcttgccttgagtgcttcaagtagtgtgtgcccgtctgttgtgtgactctggtaactagagatccctcagacccttttagtcagtgtggaaaatctctagcagcatctagaattaattccgtgtattctatagtgtcacctaaatcgtatgtgtatgatacataaggttatgtattaattgtagccgcgttctaacgacaatatgtacaagcctaattgtgtagcatctggcttactgaagcagaccctatcatctctctcgtaaactgccgtcagagtcggtttggttggacgaaccttctgagtttctggtaacgccgtcccgcacccggaaatggtcagcgaaccaatcagcagggtcatcgctagccagatcctctacgccggacgcatcgtggccggcatcaccggcgccacaggtgcggttgctggcgcctatatcgccgacatcaccgatggggaagatcgggctcgccacttcgggctcatgagcgcttgtttcggcgtgggtatggtggcaggccccgtggccgggggactgttgggcgccatctccttgcatgcaccattccttgcggcggcggtgctcaacggcctcaacctactactgggctgcttcctaatgcaggagtcgcataagggagagcgtcgaatggtgcactctcagtacaatctgctctgatgccgcatagttaagccagccccgacacccgccaacacccgctgacgcgccctgacgggcttgtctgctcccggcatccgcttacagacaagctgtgaccgtctccgggagctgcatgtgtcagaggttttcaccgtcatcaccgaaacgcgcgagacgaaagggcctcgtgatacgcctatttttataggttaatgtcatgataataatggtttcttagacgtcaggtggcacttttcggggaaatgtgcgcggaacccctatttgtttatttttctaaatacattcaaatatgtatccgctcatgagacaataaccctgataaatgcttcaataatattgaaaaaggaagagtatgagtattcaacatttccgtgtcgcccttattcccttttttgcggcattttgccttcctgtttttgctcacccagaaacgctggtgaaagtaaaagatgctgaagatcagttgggtgcacgagtgggttacatcgaactggatctcaacagcggtaagatccttgagagttttcgccccgaagaacgttttccaatgatgagcacttttaaagttctgctatgtggcgcggtattatcccgtattgacgccgggcaagagcaactcggtcgccgcatacactattctcagaatgacttggttgagtactcaccagtcacagaaaagcatcttacggatggcatgacagtaagagaattatgcagtgctgccataaccatgagtgataacactgcggccaacttacttctgacaacgatcggaggaccgaaggagctaaccgcttttttgcacaacatgggggatcatgtaactcgccttgatcgttgggaaccggagctgaatgaagccataccaaacgacgagcgtgacaccacgatgcctgtagcaatggcaacaacgttgcgcaaactattaactggcgaactacttactctagcttcccggcaacaattaatagactggatggaggcggataaagttgcaggaccacttctgcgctcggcccttccggctggctggtttattgctgataaatctggagccggtgagcgtgggtctcgcggtatcattgcagcactggggccagatggtaagccctcccgtatcgtagttatctacacgacggggagtcaggcaactatggatgaacgaaatagacagatcgctgagataggtgcctcactgattaagcattggtaactgtcagaccaagtttactcatatatactttagattgatttaaaacttcatttttaatttaaaaggatctaggtgaagatcctttttgataatctcatgaccaaaatcccttaacgtgagttttcgttccactgagcgtcagaccccgtagaaaagatcaaaggatcttcttgagatcctttttttctgcgcgtaatctgctgcttgcaaacaaaaaaaccaccgctaccagcggtggtttgtttgccggatcaagagctaccaactctttttccgaaggtaactggcttcagcagagcgcagataccaaatactgtctttctagtgtagccgtagttaggccaccacttcaagaactctgtagcaccgcctacatacctcgctctgctaatcctgttaccagtggctgctgccagtggcgataagtcgtgtcttaccgggttggactcaagacgatagttaccggataaggcgcagcggtcgggctgaacggggggttcgtgcacacagcccagcttggagcgaacgacctacaccgaactgagatacctacagcgtgagctatgagaaagcgccacgcttcccgaagggagaaaggcggacaggtatccggtaagcggcagggtcggaacaggagagcgcacgagggagcttccagggggaaacgcctggtatctttatagtcctgtcgggtttcgccacctctgacttgagcgtcgatttttgtgatgctcgtcaggggggcggagcctatggaaaaacgccagcaacgcggcctttttacggttcctggccttttgctggccttttgctcacatgttctttcctgcgttatcccctgattctgtggataaccgtattaccgcctttgagtgagctgataccgctcgccgcagccgaacgaccgagcgcagcgagtcagtgagcgaggaagcggaagagcgcccaatacgcaaaccgcctctccccgcgcgttggccgattcattaatgcagctgtggaatgtgtgtcagttagggtgtggaaagtccccaggctccccagcaggcagaagtatgcaaagcatgcatctcaattagtcagcaaccaggtgtggaaagtccccaggctccccagcaggcagaagtatgcaaagcatgcatctcaattagtcagcaaccatagtcccgcccctaactccgcccatcccgcccctaactccgcccagttccgcccattctccgccccatggctgactaattttttttatttatgcagaggccgaggccgcctcggcctctgagctattccagaagtagtgaggaggcttttttggaggcctaggcttttgcaaaaagcttggacacaagacaggcttgcgagatatgtttgagaataccactttatcccgcgtcagggagaggcagtgcgtaaaaagacgcggactcatgtgaaatactggtttttagtgcgccagatctctataatctcgcgcaacctattttcccctcgaacactttttaagccgtagataaacaggctgggacacttcacatgagcgaaaaatacatcgtcacctgggacatgttgcagatccatgcacgtaaactcgcaagccgactgatgccttctgaacaatggaaaggcattattgccgtaagccgtggcggtctgtaccgggtgcgttactggcgcgtgaactgggtattcgtcatgtcgataccgtttgtatttccagctacgatcacgacaaccagcgcgagcttaaagtgctgaaacgcgcagaaggcgatggcgaaggcttcatcgttattgatgacctggtggataccggtggtactgcggttgcgattcgtgaaatgtatccaaaagcgcactttgtcaccatcttcgcaaaaccggctggtcgtccgctggttgatgactatgttgttgatatcccgcaagatacctggattgaacagccgtgggatatgggcgtcgtattcgtcccgccaatctccggtcgctaatcttttcaacgcctggcactgccgggcgttgttctttttaacttcaggcgggttacaatagtttccagtaagtattctggaggctgcatccatgacacaggcaaacctgagcgaaaccctgttcaaaccccgctttaaacatcctgaaacctcgacgctagtccgccgctttaatcacggcgcacaaccgcctgtgcagtcggcccttgatggtaaaaccatccctcactggtatcgcatgattaaccgtctgatgtggatctggcgcggcattgacccacgcgaaatcctcgacgtccaggcacgtattgtgatgagcgatgccgaacgtaccgacgatgatttatacgatacggtgattggctaccgtggcggcaactggatttatgagtgggccccggatctttgtgaaggaaccttacttctgtggtgtgacataattggacaaactacctacagagatttaaagctctaaggtaaatataaaatttttaagtgtataatgtgttaaactactgattctaattgtttgtgtattttagattccaacctatggaactgatgaatgggagcagtggtggaatgcctttaatgaggaaaacctgttttgctcagaagaaatgccatctagtgatgatgaggctactgctgactctcaacattctactcctccaaaaaagaagagaaaggtagaagaccccaaggactttccttcagaattgctaagttttttgagtcatgctgtgtttagtaatagaactcttgcttgctttgctatttacaccacaaaggaaaaagctgcactgctatacaagaaaattatggaaaaatattctgtaacctttataagtaggcataacagttataatcataacatactgttttttcttactccacacaggcatagagtgtctgctattaataactatgctcaaaaattgtgtacctttagctttttaatttgtaaaggggttaataaggaatatttgatgtatagtgccttgactagagatcataatcagccataccacatttgtagaggttttacttgctttaaaaaacctcccacacctccccctgaacctgaaacataaaatgaatgcaattgttgttgttaacttgtttattgcagcttataatggttacaaataaagcaatagcatcacaaatttcacaaataaagcatttttttcactgcattctagttgtggtttgtccaaactcatcaatgtatcttatcatgtctggatcaactggataactcaagctaaccaaaatcatcccaaacttcccaccccataccctattaccactgccaattacctagtggtttcatttactctaaacctgtgattcctctgaattattttcattttaaagaaattgtatttgttaaatatgtactacaaacttagtagttggaagggctaattcactcccaaagaagacaagatatccttgatctgtggatctaccacacacaaggctacttccctgattagcagaactacacaccagggccaggggtcagatatccactgacctttggatggtgctacaagctagtaccagttgagccagataaggtagaagaggccaataaaggagagaacaccagcttgttacaccctgtgagcctgcatgggatggatgacccggagagagaagtgttagagtggaggtttgacagccgcctagcatttcatcacgtggcccgagagctgcatccggagtacttcaagaactgctgatatcgagcttgctacaagggactttccgctggggactttccagggaggcgtggcctgggcgggactggggagtggcgagccctcagatcctgcatataagcagctgctttttgcctgtactgggtctctctggttagaccagatctgagcctgggagctctctggctaactagggaacccactgcttaagcctcaataaagcttgccttgagtgcttcaagtagtgtgtgcccgtctgttgtgtgactctggtaactagagatccctcagacccttttagtcagtgtggaaaatctctagcagtggcgcccgaacagggacttgaaagcgaaagggaaaccagaggagctctctcgacgcaggactcggcttgctgaagcgcgcacggcaagaggcgaggggcggcgactggtgagtacgccaaaaattttgactagcggaggctagaaggagagagatgggtgcgagagcgtcagtattaagcgggggagaattagatcgcgatgggaaaaaattcggttaaggccagggggaaagaaaaaatataaattaaaacatatagtatgggcaagcagggagctagaacgattcgcagttaatcctggcctgttagaaacatcagaaggctgtagacaaatactgggacagctacaaccatcccttcagacaggatcagaagaacttagatcattatataatacagtagcaaccctctattgtgtgcatcaaaggatagagataaaagacaccaaggaagctttagacaagatagaggaagagcaaaacaaaagtaagaccaccgcacagcaagcggccggccgctgatcttcagacctggaggaggagatatgagggacaattggagaagtgaattatataaatataaagtagtaaaaattgaaccattaggagtagcacccaccaaggcaaagagaagagtggtgcagagagaaaaaagagcagtgggaataggagctttgttccttgggttcttgggagcagcaggaagcactatgggcgcagcgtcaatgacgctgacggtacaggccagacaattattgtctggtatagtgcagcagcagaacaatttgctgagggctattgaggcgcaacagcatctgttgcaactcacagtctggggcatcaagcagctccaggcaagaatcctggctgtgaaagatacctaaaggatcaacagctcctggggatttggggttgctctggaaaactcatttgcaccactgctgtgccttggaatgctagttggagtaataaatctctggaacagatttggaatcacacgacctggatggagtgggacagagaaattaacaattacacaagcttaatacactccttaattgaagaatcgcaaaaccagcaagaaaagaatgaacaagaattattggaattagataaatgggcaagtttgtggaattggtttaacataacaaattggctgtggtatataaaattattcataatgatagtaggaggcttggtaggtttaagaatagtttttgctgtactttctatagtgaatagagttaggcagggatattcaccattatcgtttcagacccacctcccaaccccgaggggacccgacaggcccgaaggaatagaagaagaaggtggagagagagacagagacagatccattcgattagtgaacggatctcgacggtatcgccaaatggcagtattcatccacaattttaaaagaaaaggggggattggggggtacagtgcaggggaaagaatagtagacataatagcaacagacatacaaactaaagaattacaaaaacaaattacaaaaattcaaaattttcgggtttattacagggacagcagagatccagtttggatcgataagcttgatatcgaattcctgcagcccgtgaggctccggtgcccgtcagtgggcagagcgcacatcgcccacagtccccgagaagttggggggaggggtcggcaattgaaccggtgcctagagaaggtggcgcggggtaaactgggaaagtgatgtcgtgtactggctccgcctttttcccgagggtgggggagaaccgtatataagtgcagtagtcgccgtgaacgttctttttcgcaacgggtttgccgccagaacacaggtaagtgccgtgtgtggttcccgcgggcctggcctctttacgggttatggcccttgcgtgccttgaattacttccacctggctgcagtacgtgattcttgatcccgagcttcgggttggaagtgggtgggagagttcgaggccttgcgcttaaggagccccttcgcctcgtgcttgagttgaggcctggcctgggcgctggggccgccgcgtgcgaatctggtggcaccttcgcgcctgtctcgctgctttcgataagtctctagccatttaaaatttttgatgacctgctgcgacgctttttttctggcaagatagtcttgtaaatgcgggccaagatctgcacactggtatttcggtttttggggccgcgggcggcgacggggcccgtgcgtcccagcgcacatgttcggcgaggcggggcctgcgagcgcggccaccgagaatcggacgggggtagtctcaagctggccggcctgctctggtgcctggcctcgcgccgccgtgtatcgccccgccctgggcggcaaggctggcccggtcggcaccagttgcgtgagcggaaagatggccgcttcccggccctgctgcagggagctcaaaatggaggacgcggcgctcgggagagcgggcgggtgagtcacccacacaaaggaaaagggcctttccgtcctcagccgtcgcttcatgtgactccacggagtaccgggcgccgtccaggcacctcgattagttctcgagcttttggagtacgtcgtctttaggttggggggaggggttttatgcgatggagtttccccacactgagtgggtggagactgaagttaggccagcttggcacttgatgtaattctccttggaatttgccctttttgagtttggatcttggttcattctcaagcctcagacagtggttcaaagtttttttcttccatttcaggtgtcgtgaggggatctggagctctcgagaattctcacgcgtgccgccaccatggccttaccagtgaccgccttgctcctgccgctggccttgctgctccacgccgccaggccggacatccagatgacacagactacatcctccctgtctgcctctctgggagacagagtcaccatcagttgcagggcaagtcaggacattagtaaatatttaaattggtatcagcagaaaccagatggaactgttaaactcctgatctaccatacatcaagattacactcaggagtcccatcaaggttcagtggcagtgggtctggaacagattattctctcaccattagcaacctggagcaagaagatattgccacttacttttgccaacagggtaatacgcttccgtacacgttcggaggcggcaccaagctggagatcacaggtggcggtggctcgggcggtggtgggtcgggtggcggcggatctgaggtgaaactgcaggagtcaggacctggcctggtggcgccctcacagagcctgtccgtcacatgcactgtctcaggggtctcattacccgactatggtgtaagctggattcgccagcctccacgaaagggtctggagtggctgggagtaatatggggtagtgaaaccacatactataattcagctctcaaatccagactgaccatcatcaaggacaactccaagagccaagttttcttaaaaatgaacagtctgcaaactgatgacacagccatttactactgtgccaaacattattactacggtggtagctatgctatggactactggggccaaggaacctcagtcaccgtctcctcagggaagcctatcccgaaccctctgttgggtctcgatagtaccaatggggccgcaaccacgacgccagcgccgcgaccaccaacaccggcgcccaccatcgcgttgcagcccctgtccctgcgcccagaggcgtgccggccagcggcggggggcgcagtgcacacgagggggctggacttcgcctgtgatttttgggtgctggtggtggttggtggagtcctggcttgctatagcttgctagtaacagtggcctttattattttctgggtgaggagtaagaggagcaggctcctgcacagtgactacatgaacatgactccccgccgccccgggcccacccgcaagcattaccagccctatgccccaccacgcgacttcgcagcctatcgctccggctcaggaagctcttccgacgaagaagaagcgcgcgagctgatcgagcgtgcgaaggaggctgcggaacgcgcgcaagaagctgctgagcgtaccggtgatccgcgcgtgcgtgaactcgctcgtgagctgaaacgcctggctcaggaagctgctgaagaagtgaagcgtgacccgtcttcctccgatgtgaacgaagcgctcaaactcatcgtggaagctatcgaggcggctgtggacgcgctcgaagcggctgaacgcaccggcgacccggaggttcgtgagctggcgcgtgagctcgtgcgcctcgcggttgaggctgcggaggaggtgcaacgtaacccatcctcctctgacgtgaatgaggctctccacagcatagtttacgctattgaagctgccatttttgcattggaagctgccgaaaggactggtgacccggaagtgagagaactcgcccgagagcttgtaagactggcggttgaggcggctgaagaagtccagcgaaatccgtccagccggaatgtcgagcacgcactgatgaggattgtgttggccatttacctggcagaagaaaatctccgcgaagctgaggagtctggcgatccggaaaaacgtgaaaaggctcgcgaacgtgttcgtgaggcggtggaacgtgcggaagaggttcagcgtgatccatccggttggctgaatcatggcagtggagagggcagaggaagtctgctaacatgcggtgacgtcgaggagaatcctggcccaatgattcatcttggtcacatcctcttcttgctgctgttgccagttgctgccgcacaaacaaccccaggtgagaggtcaagtcttcccgccttctatccgggcacaagcgggagttgtagtgggtgtggatctttgtcccttcctatatacatctgggctcctctggctggcacttgcggagtgcttctgctgagtctggttattaccaaacggggcagaaagaaactcctgtatatattcaaacaaccatttatgagaccagtacaaactactcaagaggaagatggctgtagctgccgatttccagaagaagaagaaggaggatgtgaactgggctgcgtggtcatagtgggcaggatcgtcttgtccggatccggcactagtatcacggcctactcccaacagacgcggggcctacttggttgcatcatcactagcctcacaggccgggacaagaaccaggtcgaaggggaggttcaagtggtttctaccgcaacacaatctttcctggcgacctgcgtcaacggcgtgtgctggactgtctaccatggcgctggctcgaagaccctagccggtccaaaaggtccaatcacccaaatgtacaccaatgtagaccaggacctcgtcggctggcaggcgcctccaggggcgcgctccttgacaccatgcacctgtggcagctcggacctttacttggtcacgagacatgctgatgtcattccggtgcgccggcgaggcgacagcaggggaagtctactctcccccaggcccgtctcctacctgaaaggctccgcaggtggtccattgctttgcccttcggggcacgctgtgggcatcttccgggctgctgtgtgcacccggggggtcgcgaaggcggtggacttcgtgcccgttgagtctatggaaactaccatgcggtctagagtgaagttcagcaggagcgcagacgcccccgcgtacaagcagggccagaaccagctctataacgagctcaatctaggacgaagagaggagtacgatgttttggacaagagacgtggccgggaccctgagatggggggaaagccgagaaggaagaaccctcaggaaggcctgtacaatgaactgcagaaagataagatggcggaggcctacagtgagattgggatgaaaggcgagcgccggaggggcaaggggcacgatggcctttaccagggtctcagtacagccaccaaggacacctacgacgcccttcacatgcaggccctgccccctcgcggcatggtgagcaagggcgaggaggataacatggccatcatcaaggagttcatgcgcttcaaggtgcacatggagggctccgtgaacggccacgagttcgagatcgagggcgagggcgagggccgcccctacgagggcacccagaccgccaagctgaaggtgaccaagggtggccccctgcccttcgcctgggacatcctgtcccctcagttcatgtacggctccaaggcctacgtgaagcaccccgccgacatccccgactacttgaagctgtccttccccgagggcttcaagtgggagcgcgtgatgaacttcgaggacggcggcgtggtgaccgtgacccaggactcctccctgcaggacggcgagttcatctacaaggtgaagctgcgcggcaccaacttcccctccgacggccccgtaatgcagaagaagaccatgggctgggaggcctcctccgagcggatgtaccccgaggacggcgccctgaagggcgagatcaagcagaggctgaagctgaaggacggcggccactacgacgctgaggtcaagaccacctacaaggccaagaagcccgtgcagctgcccggcgcctacaacgtcaacatcaagttggacatcacctcccacaacgaggactacaccatcgtggaacagtacgaacgcgccgagggccgccactccaccggcggcatggacgagctgtacaagtaagcggccgcgactctagagtcgacctgcaggcatgcaagcttgatatcaagcttatcgataatcaacctctggattacaaaatttgtgaaagattgactggtattcttaactatgttgctccttttacgctatgtggatacgctgctttaatgcctttgtatcatgctattgcttcccgtatggctttcattttctcctccttgtataaatcctggttgctgtctctttatgaggagttgtggcccgttgtcaggcaacgtggcgtggtgtgcactgtgtttgctgacgcaacccccactggttggggcattgccaccacctgtcagctcctttccgggactttcgctttccccctccctattgccacggcggaactcatcgccgcctgccttgcccgctgctggacaggggctcggctgttgggcactgacaattccgtggtgttgtcggggaaatcatcgtcctttccttggctgctcgcctgtgttgccacctggattctgcgcgggacgtccttctgctacgtcccttcggccctcaatccagcggaccttccttcccgcggcctgctgccggctctgcggcctcttccgcgtcttcgccttcgccctcagacgagtcggatctccctttgggccgcctccccgcat

SEQ ID NO: 246 - DNA, 13728 bp, Artificial Sequence
  synthetic vector
cgataccgtcgacctcgagggaattaattcgagctcggtacctttaagaccaatgacttacaaggcagctgtagatcttagccactttttaaaagaaaaggggggactggaagggctaattcactcccaacgaagacaagatctgctttttgcttgtactgggtctctctggttagaccagatctgagcctgggagctctctggctaactagggaacccactgcttaagcctcaataaagcttgccttgagtgcttcaagtagtgtgtgcccgtctgttgtgtgactctggtaactagagatccctcagacccttttagtcagtgtggaaaatctctagcagcatctagaattaattccgtgtattctatagtgtcacctaaatcgtatgtgtatgatacataaggttatgtattaattgtagccgcgttctaacgacaatatgtacaagcctaattgtgtagcatctggcttactgaagcagaccctatcatctctctcgtaaactgccgtcagagtcggtttggttggacgaaccttctgagtttctggtaacgccgtcccgcacccggaaatggtcagcgaaccaatcagcagggtcatcgctagccagatcctctacgccggacgcatcgtggccggcatcaccggcgccacaggtgcggttgctggcgcctatatcgccgacatcaccgatggggaagatcgggctcgccacttcgggctcatgagcgcttgtttcggcgtgggtatggtggcaggccccgtggccgggggactgttgggcgccatctccttgcatgcaccattccttgcggcggcggtgctcaacggcctcaacctactactgggctgcttcctaatgcaggagtcgcataagggagagcgtcgaatggtgcactctcagtacaatctgctctgatgccgcatagttaagccagccccgacacccgccaacacccgctgacgcgccctgacgggcttgtctgctcccggcatccgcttacagacaagctgtgaccgtctccgggagctgcatgtgtcagaggttttcaccgtcatcaccgaaacgcgcgagacgaaagggcctcgtgatacgcctatttttataggttaatgtcatgataataatggtttcttagacgtcaggtggcacttttcggggaaatgtgcgcggaacccctatttgtttatttttctaaatacattcaaatatgtatccgctcatgagacaataaccctgataaatgcttcaataatattgaaaaaggaagagtatgagtattcaacatttccgtgtcgcccttattcccttttttgcggcattttgccttcctgtttttgctcacccagaaacgctggtgaaagtaaaagatgctgaagatcagttgggtgcacgagtgggttacatcgaactggatctcaacagcggtaagatccttgagagttttcgccccgaagaacgttttccaatgatgagcacttttaaagttctgctatgtggcgcggtattatcccgtattgacgccgggcaagagcaactcggtcgccgcatacactattctcagaatgacttggttgagtactcaccagtcacagaaaagcatcttacggatggcatgacagtaagagaattatgcagtgctgccataaccatgagtgataacactgcggccaacttacttctgacaacgatcggaggaccgaaggagctaaccgcttttttgcacaacatgggggatcatgtaactcgccttgatcgttgggaaccggagctgaatgaagccataccaaacgacgagcgtgacaccacgatgcctgtagcaatggcaacaacgttgcgcaaactattaactggcgaactacttactctagcttcccggcaacaattaatagactggatggaggcggataaagttgcaggaccacttctgcgctcggcccttccggctggctggtttattgctgataaatctggagccggtgagcgtgggtctcgcggtatcattgcagcactggggccagatggtaagccctcccgtatcgtagttatctacacgacggggagtcaggcaactatggatgaacgaaatagacagatcgctgagataggtgcctcactgattaagcattggtaactgtcagaccaagtttactcatatatactttagattgatttaaaacttcatttttaatttaaaaggatctaggtgaagatcctttttgataatctcatgaccaaaatcccttaacgtgagttttcgttccactgagcgtcagaccccgtagaaaagatcaaaggatcttcttgagatcctttttttctgcgcgtaatctgctgcttgcaaacaaaaaaaccaccgctaccagcggtggtttgtttgccggatcaagagctaccaactctttttccgaaggtaactggcttcagcagagcgcagataccaaatactgtctttctagtgtagccgtagttaggccaccacttcaagaactctgtagcaccgcctacatacctcgctctgctaatcctgttaccagtggctgctgccagtggcgataagtcgtgtcttaccgggttggactcaagacgatagttaccggataaggcgcagcggtcgggctgaacggggggttcgtgcacacagcccagcttggagcgaacgacctacaccgaactgagatacctacagcgtgagctatgagaaagcgccacgcttcccgaagggagaaaggcggacaggtatccggtaagcggcagggtcggaacaggagagcgcacgagggagcttccagggggaaacgcctggtatctttatagtcctgtcgggtttcgccacctctgacttgagcgtcgatttttgtgatgctcgtcaggggggcggagcctatggaaaaacgccagcaacgcggcctttttacggttcctggccttttgctggccttttgctcacatgttctttcctgcgttatcccctgattctgtggataaccgtattaccgcctttgagtgagctgataccgctcgccgcagccgaacgaccgagcgcagcgagtcagtgagcgaggaagcggaagagcgcccaatacgcaaaccgcctctccccgcgcgttggccgattcattaatgcagctgtggaatgtgtgtcagttagggtgtggaaagtccccaggctccccagcaggcagaagtatgcaaagcatgcatctcaattagtcagcaaccaggtgtggaaagtccccaggctccccagcaggcagaagtatgcaaagcatgcatctcaattagtcagcaaccatagtcccgcccctaactccgcccatcccgcccctaactccgcccagttccgcccattctccgccccatggctgactaattttttttatttatgcagaggccgaggccgcctcggcctctgagctattccagaagtagtgaggaggcttttttggaggcctaggcttttgcaaaaagcttggacacaagacaggcttgcgagatatgtttgagaataccactttatcccgcgtcagggagaggcagtgcgtaaaaagacgcggactcatgtgaaatactggtttttagtgcgccagatctctataatctcgcgcaacctattttcccctcgaacactttttaagccgtagataaacaggctgggacacttcacatgagcgaaaaatacatcgtcacctgggacatgttgcagatccatgcacgtaaactcgcaagccgactgatgccttctgaacaatggaaaggcattattgccgtaagccgtggcggtctgtaccgggtgcgttactggcgcgtgaactgggtattcgtcatgtcgataccgtttgtatttccagctacgatcacgacaaccagcgcgagcttaaagtgctgaaacgcgcagaaggcgatggcgaaggcttcatcgttattgatgacctggtggataccggtggtactgcggttgcgattcgtgaaatgtatccaaaagcgcactttgtcaccatcttcgcaaaaccggctggtcgtccgctggttgatgactatgttgttgatatcccgcaagatacctggattgaacagccgtgggatatgggcgtcgtattcgtcccgccaatctccggtcgctaatcttttcaacgcctggcactgccgggcgttgttctttttaacttcaggcgggttacaatagtttccagtaagtattctggaggctgcatccatgacacaggcaaacctgagcgaaaccctgttcaaaccccgctttaaacatcctgaaacctcgacgctagtccgccgctttaatcacggcgcacaaccgcctgtgcagtcggcccttgatggtaaaaccatccctcactggtatcgcatgattaaccgtctgatgtggatctggcgcggcattgacccacgcgaaatcctcgacgtccaggcacgtattgtgatgagcgatgccgaacgtaccgacgatgatttatacgatacggtgattggctaccgtggcggcaactggatttatgagtgggccccggatctttgtgaaggaaccttacttctgtggtgtgacataattggacaaactacctacagagatttaaagctctaaggtaaatataaaatttttaagtgtataatgtgttaaactactgattctaattgtttgtgtattttagattccaacctatggaactgatgaatgggagcagtggtggaatgcctttaatgaggaaaacctgttttgctcagaagaaatgccatctagtgatgatgaggctactgctgactctcaacattctactcctccaaaaaagaagagaaaggtagaagaccccaaggactttccttcagaattgctaagttttttgagtcatgctgtgtttagtaatagaactcttgcttgctttgctatttacaccacaaaggaaaaagctgcactgctatacaagaaaattatggaaaaatattctgtaacctttataagtaggcataacagttataatcataacatactgttttttcttactccacacaggcatagagtgtctgctattaataactatgctcaaaaattgtgtacctttagctttttaatttgtaaaggggttaataaggaatatttgatgtatagtgccttgactagagatcataatcagccataccacatttgtagaggttttacttgctttaaaaaacctcccacacctccccctgaacctgaaacataaaatgaatgcaattgttgttgttaacttgtttattgcagcttataatggttacaaataaagcaatagcatcacaaatttcacaaataaagcatttttttcactgcattctagttgtggtttgtccaaactcatcaatgtatcttatcatgtctggatcaactggataactcaagctaaccaaaatcatcccaaacttcccaccccataccctattaccactgccaattacctagtggtttcatttactctaaacctgtgattcctctgaattattttcattttaaagaaattgtatttgttaaatatgtactacaaacttagtagttggaagggctaattcactcccaaagaagacaagatatccttgatctgtggatctaccacacacaaggctacttccctgattagcagaactacacaccagggccaggggtcagatatccactgacctttggatggtgctacaagctagtaccagttgagccagataaggtagaagaggccaataaaggagagaacaccagcttgttacaccctgtgagcctgcatgggatggatgacccggagagagaagtgttagagtggaggtttgacagccgcctagcatttcatcacgtggcccgagagctgcatccggagtacttcaagaactgctgatatcgagcttgctacaagggactttccgctggggactttccagggaggcgtggcctgggcgggactggggagtggcgagccctcagatcctgcatataagcagctgctttttgcctgtactgggtctctctggttagaccagatctgagcctgggagctctctggctaactagggaacccactgcttaagcctcaataaagcttgccttgagtgcttcaagtagtgtgtgcccgtctgttgtgtgactctggtaactagagatccctcagacccttttagtcagtgtggaaaatctctagcagtggcgcccgaacagggacttgaaagcgaaagggaaaccagaggagctctctcgacgcaggactcggcttgctgaagcgcgcacggcaagaggcgaggggcggcgactggtgagtacgccaaaaattttgactagcggaggctagaaggagagagatgggtgcgagagcgtcagtattaagcgggggagaattagatcgcgatgggaaaaaattcggttaaggccagggggaaagaaaaaatataaattaaaacatatagtatgggcaagcagggagctagaacgattcgcagttaatcctggcctgttagaaacatcagaaggctgtagacaaatactgggacagctacaaccatcccttcagacaggatcagaagaacttagatcattatataatacagtagcaaccctctattgtgtgcatcaaaggatagagataaaagacaccaaggaagctttagacaagatagaggaagagcaaaacaaaagtaagaccaccgcacagcaagcggccggccgctgatcttcagacctggaggaggagatatgagggacaattggagaagtgaattatataaatataaagtagtaaaaattgaaccattaggagtagcacccaccaaggcaaagagaagagtggtgcagagagaaaaaagagcagtgggaataggagctttgttccttgggttcttgggagcagcaggaagcactatgggcgcagcgtcaatgacgctgacggtacaggccagacaattattgtctggtatagtgcagcagcagaacaatttgctgagggctattgaggcgcaacagcatctgttgcaactcacagtctggggcatcaagcagctccaggcaagaatcctggctgtgaaagatacctaaaggatcaacagctcctggggatttggggttgctctggaaaactcatttgcaccactgctgtgccttggaatgctagttggagtaataaatctctggaacagatttggaatcacacgacctggatggagtgggacagagaaattaacaattacacaagcttaatacactccttaattgaagaatcgcaaaaccagcaagaaaagaatgaacaagaattattggaattagataaatgggcaagtttgtggaattggtttaacataacaaattggctgtggtatataaaattattcataatgatagtaggaggcttggtaggtttaagaatagtttttgctgtactttctatagtgaatagagttaggcagggatattcaccattatcgtttcagacccacctcccaaccccgaggggacccgacaggcccgaaggaatagaagaagaaggtggagagagagacagagacagatccattcgattagtgaacggatctcgacggtatcgccaaatggcagtattcatccacaattttaaaagaaaaggggggattggggggtacagtgcaggggaaagaatagtagacataatagcaacagacatacaaactaaagaattacaaaaacaaattacaaaaattcaaaattttcgggtttattacagggacagcagagatccagtttggatcgataagcttgatatcgaattcctgcagcccgtgaggctccggtgcccgtcagtgggcagagcgcacatcgcccacagtccccgagaagttggggggaggggtcggcaattgaaccggtgcctagagaaggtggcgcggggtaaactgggaaagtgatgtcgtgtactggctccgcctttttcccgagggtgggggagaaccgtatataagtgcagtagtcgccgtgaacgttctttttcgcaacgggtttgccgccagaacacaggtaagtgccgtgtgtggttcccgcgggcctggcctctttacgggttatggcccttgcgtgccttgaattacttccacctggctgcagtacgtgattcttgatcccgagcttcgggttggaagtgggtgggagagttcgaggccttgcgcttaaggagccccttcgcctcgtgcttgagttgaggcctggcctgggcgctggggccgccgcgtgcgaatctggtggcaccttcgcgcctgtctcgctgctttcgataagtctctagccatttaaaatttttgatgacctgctgcgacgctttttttctggcaagatagtcttgtaaatgcgggccaagatctgcacactggtatttcggtttttggggccgcgggcggcgacggggcccgtgcgtcccagcgcacatgttcggcgaggcggggcctgcgagcgcggccaccgagaatcggacgggggtagtctcaagctggccggcctgctctggtgcctggcctcgcgccgccgtgtatcgccccgccctgggcggcaaggctggcccggtcggcaccagttgcgtgagcggaaagatggccgcttcccggccctgctgcagggagctcaaaatggaggacgcggcgctcgggagagcgggcgggtgagtcacccacacaaaggaaaagggcctttccgtcctcagccgtcgcttcatgtgactccacggagtaccgggcgccgtccaggcacctcgattagttctcgagcttttggagtacgtcgtctttaggttggggggaggggttttatgcgatggagtttccccacactgagtgggtggagactgaagttaggccagcttggcacttgatgtaattctccttggaatttgccctttttgagtttggatcttggttcattctcaagcctcagacagtggttcaaagtttttttcttccatttcaggtgtcgtgaggggatctggagctctcgagaattctcacgcgtgccgccaccatggccttaccagtgaccgccttgctcctgccgctggccttgctgctccacgccgccaggccggacatccagatgacacagactacatcctccctgtctgcctctctgggagacagagtcaccatcagttgcagggcaagtcaggacattagtaaatatttaaattggtatcagcagaaaccagatggaactgttaaactcctgatctaccatacatcaagattacactcaggagtcccatcaaggttcagtggcagtgggtctggaacagattattctctcaccattagcaacctggagcaagaagatattgccacttacttttgccaacagggtaatacgcttccgtacacgttcggaggcggcaccaagctggagatcacaggtggcggtggctcgggcggtggtgggtcgggtggcggcggatctgaggtgaaactgcaggagtcaggacctggcctggtggcgccctcacagagcctgtccgtcacatgcactgtctcaggggtctcattacccgactatggtgtaagctggattcgccagcctccacgaaagggtctggagtggctgggagtaatatggggtagtgaaaccacatactataattcagctctcaaatccagactgaccatcatcaaggacaactccaagagccaagttttcttaaaaatgaacagtctgcaaactgatgacacagccatttactactgtgccaaacattattactacggtggtagctatgctatggactactggggccaaggaacctcagtcaccgtctcctcagggaagcctatcccgaaccctctgttgggtctcgatagtaccaatggggccgcaaccacgacgccagcgccgcgaccaccaacaccggcgcccaccatcgcgttgcagcccctgtccctgcgcccagaggcgtgccggccagcggcggggggcgcagtgcacacgagggggctggacttcgcctgtgatttttgggtgctggtggtggttggtggagtcctggcttgctatagcttgctagtaacagtggcctttattattttctgggtgaggagtaagaggagcaggctcctgcacagtgactacatgaacatgactccccgccgccccgggcccacccgcaagcattaccagccctatgccccaccacgcgacttcgcagcctatcgctccaaacggggcagaaagaaactcctgtatatattcaaacaaccatttatgagaccagtacaaactactcaagaggaagatggctgtagctgccgatttccagaagaagaagaaggaggatgtgaactgggctcaggaagctcttccgacgaagaagaagcgcgcgagctgatcgagcgtgcgaaggaggctgcggaacgcgcgcaagaagctgctgagcgtaccggtgatccgcgcgtgcgtgaactcgctcgtgagctgaaacgcctggctcaggaagctgctgaagaagtgaagcgtgacccgtcttcctccgatgtgaacgaagcgctcaaactcatcgtggaagctatcgaggcggctgtggacgcgctcgaagcggctgaacgcaccggcgacccggaggttcgtgagctggcgcgtgagctcgtgcgcctcgcggttgaggctgcggaggaggtgcaacgtaacccatcctcctctgacgtgaatgaggctctccacagcatagtttacgctattgaagctgccatttttgcattggaagctgccgaaaggactggtgacccggaagtgagagaactcgcccgagagcttgtaagactggcggttgaggcggctgaagaagtccagcgaaatccgtccagccggaatgtcgagcacgcactgatgaggattgtgttggccatttacctggcagaagaaaatctccgcgaagctgaggagtctggcgatccggaaaaacgtgaaaaggctcgcgaacgtgttcgtgaggcggtggaacgtgcggaagaggttcagcgtgatccatccggttggctgaatcatggcagtggagagggcagaggaagtctgctaacatgcggtgacgtcgaggagaatcctggcccaatgattcatcttggtcacatcctcttcttgctgctgttgccagttgctgccgcacaaacaaccccaggtgagaggtcaagtcttcccgccttctatccgggcacaagcgggagttgtagtgggtgtggatctttgtcccttcctatatacatctgggctcctctggctggcacttgcggagtgcttctgctgagtctggttattaccaaacggggcagaaagaaactcctgtatatattcaaacaaccatttatgagaccagtacaaactactcaagaggaagatggctgtagctgccgatttccagaagaagaagaaggaggatgtgaactgggctgcgtggtcatagtgggcaggatcgtcttgtccggatccggcactagtgcgcccatcacggcgtacgcccagcagacgagaggcctcctagggtgtataatcaccagcctgactggccgggacaaaaaccaagtggagggtgaggtccagatcgtgtcaactgctacccaaaccttcctggcaacgtgcatcaatggggtatgctgggcagtctaccacggggccggaacgaggaccatcgcatcacccaagggtcctgtcatccagatgtataccaatgtggaccaagaccttgtgggctggcccgctcctcaaggttcccgctcattgacaccctgtacctgcggctcctcggacctttacctggtcacgaggcacgccgatgtcattcccgtgcgccggcgaggtgatagcaggggtagcctgctttcgccccggcccatttcctacttgaaaggctccgcggggggtccgctgttgtgccccgcgggacacgccgtgggcctattcagggccgcggtgtgcacccgtggagtggctaaagcggtggactttatccctgtggagaacctagagacaaccatgagatccccggtgttcacggacaactcctctagagtgaagttcagcaggagcgcagacgcccccgcgtacaagcagggccagaaccagctctataacgagctcaatctaggacgaagagaggagtacgatgttttggacaagagacgtggccgggaccctgagatggggggaaagccgagaaggaagaaccctcaggaaggcctgtacaatgaactgcagaaagataagatggcggaggcctacagtgagattgggatgaaaggcgagcgccggaggggcaaggggcacgatggcctttaccagggtctcagtacagccaccaaggacacctacgacgcccttcacatgcaggccctgccccctcgcggcatggtgagcaagggcgaggaggataacatggccatcatcaaggagttcatgcgcttcaaggtgcacatggagggctccgtgaacggccacgagttcgagatcgagggcgagggcgagggccgcccctacgagggcacccagaccgccaagctgaaggtgaccaagggtggccccctgcccttcgcctgggacatcctgtcccctcagttcatgtacggctccaaggcctacgtgaagcaccccgccgacatccccgactacttgaagctgtccttccccgagggcttcaagtgggagcgcgtgatgaacttcgaggacggcggcgtggtgaccgtgacccaggactcctccctgcaggacggcgagttcatctacaaggtgaagctgcgcggcaccaacttcccctccgacggccccgtaatgcagaagaagaccatgggctgggaggcctcctccgagcggatgtaccccgaggacggcgccctgaagggcgagatcaagcagaggctgaagctgaaggacggcggccactacgacgctgaggtcaagaccacctacaaggccaagaagcccgtgcagctgcccggcgcctacaacgtcaacatcaagttggacatcacctcccacaacgaggactacaccatcgtggaacagtacgaacgcgccgagggccgccactccaccggcggcatggacgagctgtacaagtaagcggccgcgactctagagtcgacctgcaggcatgcaagcttgatatcaagcttatcgataatcaacctctggattacaaaatttgtgaaagattgactggtattcttaactatgttgctccttttacgctatgtggatacgctgctttaatgcctttgtatcatgctattgcttcccgtatggctttcattttctcctccttgtataaatcctggttgctgtctctttatgaggagttgtggcccgttgtcaggcaacgtggcgtggtgtgcactgtgtttgctgacgcaacccccactggttggggcattgccaccacctgtcagctcctttccgggactttcgctttccccctccctattgccacggcggaactcatcgccgcctgccttgcccgctgctggacaggggctcggctgttgggcactgacaattccgtggtgttgtcggggaaatcatcgtcctttccttggctgctcgcctgtgttgccacctggattctgcgcgggacgtccttctgctacgtcccttcggccctcaatccagcggaccttccttcccgcggcctgctgccggctctgcggcctcttccgcgtcttcgccttcgccctcagacgagtcggatctccctttgggccgcctccccgcat

SEQ ID NO: 247 - DNA, 13614 bp, Artificial Sequence
  synthetic vector
cgataccgtcgacctcgagggaattaattcgagctcggtacctttaagaccaatgacttacaaggcagctgtagatcttagccactttttaaaagaaaaggggggactggaagggctaattcactcccaacgaagacaagatctgctttttgcttgtactgggtctctctggttagaccagatctgagcctgggagctctctggctaactagggaacccactgcttaagcctcaataaagcttgccttgagtgcttcaagtagtgtgtgcccgtctgttgtgtgactctggtaactagagatccctcagacccttttagtcagtgtggaaaatctctagcagcatctagaattaattccgtgtattctatagtgtcacctaaatcgtatgtgtatgatacataaggttatgtattaattgtagccgcgttctaacgacaatatgtacaagcctaattgtgtagcatctggcttactgaagcagaccctatcatctctctcgtaaactgccgtcagagtcggtttggttggacgaaccttctgagtttctggtaacgccgtcccgcacccggaaatggtcagcgaaccaatcagcagggtcatcgctagccagatcctctacgccggacgcatcgtggccggcatcaccggcgccacaggtgcggttgctggcgcctatatcgccgacatcaccgatggggaagatcgggctcgccacttcgggctcatgagcgcttgtttcggcgtgggtatggtggcaggccccgtggccgggggactgttgggcgccatctccttgcatgcaccattccttgcggcggcggtgctcaacggcctcaacctactactgggctgcttcctaatgcaggagtcgcataagggagagcgtcgaatggtgcactctcagtacaatctgctctgatgccgcatagttaagccagccccgacacccgccaacacccgctgacgcgccctgacgggcttgtctgctcccggcatccgcttacagacaagctgtgaccgtctccgggagctgcatgtgtcagaggttttcaccgtcatcaccgaaacgcgcgagacgaaagggcctcgtgatacgcctatttttataggttaatgtcatgataataatggtttcttagacgtcaggtggcacttttcggggaaatgtgcgcggaacccctatttgtttatttttctaaatacattcaaatatgtatccgctcatgagacaataaccctgataaatgcttcaataatattgaaaaaggaagagtatgagtattcaacatttccgtgtcgcccttattcccttttttgcggcattttgccttcctgtttttgctcacccagaaacgctggtgaaagtaaaagatgctgaagatcagttgggtgcacgagtgggttacatcgaactggatctcaacagcggtaagatccttgagagttttcgccccgaagaacgttttccaatgatgagcacttttaaagttctgctatgtggcgcggtattatcccgtattgacgccgggcaagagcaactcggtcgccgcatacactattctcagaatgacttggttgagtactcaccagtcacagaaaagcatcttacggatggcatgacagtaagagaattatgcagtgctgccataaccatgagtgataacactgcggccaacttacttctgacaacgatcggaggaccgaaggagctaaccgcttttttgcacaacatgggggatcatgtaactcgccttgatcgttgggaaccggagctgaatgaagccataccaaacgacgagcgtgacaccacgatgcctgtagcaatggcaacaacgttgcgcaaactattaactggcgaactacttactctagcttcccggcaacaattaatagactggatggaggcggataaagttgcaggaccacttctgcgctcggcccttccggctggctggtttattgctgataaatctggagccggtgagcgtgggtctcgcggtatcattgcagcactggggccagatggtaagccctcccgtatcgtagttatctacacgacggggagtcaggcaactatggatgaacgaaatagacagatcgctgagataggtgcctcactgattaagcattggtaactgtcagaccaagtttactcatatatactttagattgatttaaaacttcatttttaatttaaaaggatctaggtgaagatcctttttgataatctcatgaccaaaatcccttaacgtgagttttcgttccactgagcgtcagaccccgtagaaaagatcaaaggatcttcttgagatcctttttttctgcgcgtaatctgctgcttgcaaacaaaaaaaccaccgctaccagcggtggtttgtttgccggatcaagagctaccaactctttttccgaaggtaactggcttcagcagagcgcagataccaaatactgtctttctagtgtagccgtagttaggccaccacttcaagaactctgtagcaccgcctacatacctcgctctgctaatcctgttaccagtggctgctgccagtggcgataagtcgtgtcttaccgggttggactcaagacgatagttaccggataaggcgcagcggtcgggctgaacggggggttcgtgcacacagcccagcttggagcgaacgacctacaccgaactgagatacctacagcgtgagctatgagaaagcgccacgcttcccgaagggagaaaggcggacaggtatccggtaagcggcagggtcggaacaggagagcgcacgagggagcttccagggggaaacgcctggtatctttatagtcctgtcgggtttcgccacctctgacttgagcgtcgatttttgtgatgctcgtcaggggggcggagcctatggaaaaacgccagcaacgcggcctttttacggttcctggccttttgctggccttttgctcacatgttctttcctgcgttatcccctgattctgtggataaccgtattaccgcctttgagtgagctgataccgctcgccgcagccgaacgaccgagcgcagcgagtcagtgagcgaggaagcggaagagcgcccaatacgcaaaccgcctctccccgcgcgttggccgattcattaatgcagctgtggaatgtgtgtcagttagggtgtggaaagtccccaggctccccagcaggcagaagtatgcaaagcatgcatctcaattagtcagcaaccaggtgtggaaagtccccaggctccccagcaggcagaagtatgcaaagcatgcatctcaattagtcagcaaccatagtcccgcccctaactccgcccatcccgcccctaactccgcccagttccgcccattctccgccccatggctgactaattttttttatttatgcagaggccgaggccgcctcggcctctgagctattccagaagtagtgaggaggcttttttggaggcctaggcttttgcaaaaagcttggacacaagacaggcttgcgagatatgtttgagaataccactttatcccgcgtcagggagaggcagtgcgtaaaaagacgcggactcatgtgaaatactggtttttagtgcgccagatctctataatctcgcgcaacctattttcccctcgaacactttttaagccgtagataaacaggctgggacacttcacatgagcgaaaaatacatcgtcacctgggacatgttgcagatccatgcacgtaaactcgcaagccgactgatgccttctgaacaatggaaaggcattattgccgtaagccgtggcggtctgtaccgggtgcgttactggcgcgtgaactgggtattcgtcatgtcgataccgtttgtatttccagctacgatcacgacaaccagcgcgagcttaaagtgctgaaacgcgcagaaggcgatggcgaaggcttcatcgttattgatgacctggtggataccggtggtactgcggttgcgattcgtgaaatgtatccaaaagcgcactttgtcaccatcttcgcaaaaccggctggtcgtccgctggttgatgactatgttgttgatatcccgcaagatacctggattgaacagccgtgggatatgggcgtcgtattcgtcccgccaatctccggtcgctaatcttttcaacgcctggcactgccgggcgttgttctttttaacttcaggcgggttacaatagtttccagtaagtattctggaggctgcatccatgacacaggcaaacctgagcgaaaccctgttcaaaccccgctttaaacatcctgaaacctcgacgctagtccgccgctttaatcacggcgcacaaccgcctgtgcagtcggcccttgatggtaaaaccatccctcactggtatcgcatgattaaccgtctgatgtggatctggcgcggcattgacccacgcgaaatcctcgacgtccaggcacgtattgtgatgagcgatgccgaacgtaccgacgatgatttatacgatacggtgattggctaccgtggcggcaactggatttatgagtgggccccggatctttgtgaaggaaccttacttctgtggtgtgacataattggacaaactacctacagagatttaaagctctaaggtaaatataaaatttttaagtgtataatgtgttaaactactgattctaattgtttgtgtattttagattccaacctatggaactgatgaatgggagcagtggtggaatgcctttaatgaggaaaacctgttttgctcagaagaaatgccatctagtgatgatgaggctactgctgactctcaacattctactcctccaaaaaagaagagaaaggtagaagaccccaaggactttccttcagaattgctaagttttttgagtcatgctgtgtttagtaatagaactcttgcttgctttgctatttacaccacaaaggaaaaagctgcactgctatacaagaaaattatggaaaaatattctgtaacctttataagtaggcataacagttataatcataacatactgttttttcttactccacacaggcatagagtgtctgctattaataactatgctcaaaaattgtgtacctttagctttttaatttgtaaaggggttaataaggaatatttgatgtatagtgccttgactagagatcataatcagccataccacatttgtagaggttttacttgctttaaaaaacctcccacacctccccctgaacctgaaacataaaatgaatgcaattgttgttgttaacttgtttattgcagcttataatggttacaaataaagcaatagcatcacaaatttcacaaataaagcatttttttcactgcattctagttgtggtttgtccaaactcatcaatgtatcttatcatgtctggatcaactggataactcaagctaaccaaaatcatcccaaacttcccaccccataccctattaccactgccaattacctagtggtttcatttactctaaacctgtgattcctctgaattattttcattttaaagaaattgtatttgttaaatatgtactacaaacttagtagttggaagggctaattcactcccaaagaagacaagatatccttgatctgtggatctaccacacacaaggctacttccctgattagcagaactacacaccagggccaggggtcagatatccactgacctttggatggtgctacaagctagtaccagttgagccagataaggtagaagaggccaataaaggagagaacaccagcttgttacaccctgtgagcctgcatgggatggatgacccggagagagaagtgttagagtggaggtttgacagccgcctagcatttcatcacgtggcccgagagctgcatccggagtacttcaagaactgctgatatcgagcttgctacaagggactttccgctggggactttccagggaggcgtggcctgggcgggactggggagtggcgagccctcagatcctgcatataagcagctgctttttgcctgtactgggtctctctggttagaccagatctgagcctgggagctctctggctaactagggaacccactgcttaagcctcaataaagcttgccttgagtgcttcaagtagtgtgtgcccgtctgttgtgtgactctggtaactagagatccctcagacccttttagtcagtgtggaaaatctctagcagtggcgcccgaacagggacttgaaagcgaaagggaaaccagaggagctctctcgacgcaggactcggcttgctgaagcgcgcacggcaagaggcgaggggcggcgactggtgagtacgccaaaaattttgactagcggaggctagaaggagagagatgggtgcgagagcgtcagtattaagcgggggagaattagatcgcgatgggaaaaaattcggttaaggccagggggaaagaaaaaatataaattaaaacatatagtatgggcaagcagggagctagaacgattcgcagttaatcctggcctgttagaaacatcagaaggctgtagacaaatactgggacagctacaaccatcccttcagacaggatcagaagaacttagatcattatataatacagtagcaaccctctattgtgtgcatcaaaggatagagataaaagacaccaaggaagctttagacaagatagaggaagagcaaaacaaaagtaagaccaccgcacagcaagcggccggccgctgatcttcagacctggaggaggagatatgagggacaattggagaagtgaattatataaatataaagtagtaaaaattgaaccattaggagtagcacccaccaaggcaaagagaagagtggtgcagagagaaaaaagagcagtgggaataggagctttgttccttgggttcttgggagcagcaggaagcactatgggcgcagcgtcaatgacgctgacggtacaggccagacaattattgtctggtatagtgcagcagcagaacaatttgctgagggctattgaggcgcaacagcatctgttgcaactcacagtctggggcatcaagcagctccaggcaagaatcctggctgtgaaagatacctaaaggatcaacagctcctggggatttggggttgctctggaaaactcatttgcaccactgctgtgccttggaatgctagttggagtaataaatctctggaacagatttggaatcacacgacctggatggagtgggacagagaaattaacaattacacaagcttaatacactccttaattgaagaatcgcaaaaccagcaagaaaagaatgaacaagaattattggaattagataaatgggcaagtttgtggaattggtttaacataacaaattggctgtggtatataaaattattcataatgatagtaggaggcttggtaggtttaagaatagtttttgctgtactttctatagtgaatagagttaggcagggatattcaccattatcgtttcagacccacctcccaaccccgaggggacccgacaggcccgaaggaatagaagaagaaggtggagagagagacagagacagatccattcgattagtgaacggatctcgacggtatcgccaaatggcagtattcatccacaattttaaaagaaaaggggggattggggggtacagtgcaggggaaagaatagtagacataatagcaacagacatacaaactaaagaattacaaaaacaaattacaaaaattcaaaattttcgggtttattacagggacagcagagatccagtttggatcgataagcttgatatcgaattcctgcagcccgtgaggctccggtgcccgtcagtgggcagagcgcacatcgcccacagtccccgagaagttggggggaggggtcggcaattgaaccggtgcctagagaaggtggcgcggggtaaactgggaaagtgatgtcgtgtactggctccgcctttttcccgagggtgggggagaaccgtatataagtgcagtagtcgccgtgaacgttctttttcgcaacgggtttgccgccagaacacaggtaagtgccgtgtgtggttcccgcgggcctggcctctttacgggttatggcccttgcgtgccttgaattacttccacctggctgcagtacgtgattcttgatcccgagcttcgggttggaagtgggtgggagagttcgaggccttgcgcttaaggagccccttcgcctcgtgcttgagttgaggcctggcctgggcgctggggccgccgcgtgcgaatctggtggcaccttcgcgcctgtctcgctgctttcgataagtctctagccatttaaaatttttgatgacctgctgcgacgctttttttctggcaagatagtcttgtaaatgcgggccaagatctgcacactggtatttcggtttttggggccgcgggcggcgacggggcccgtgcgtcccagcgcacatgttcggcgaggcggggcctgcgagcgcggccaccgagaatcggacgggggtagtctcaagctggccggcctgctctggtgcctggcctcgcgccgccgtgtatcgccccgccctgggcggcaaggctggcccggtcggcaccagttgcgtgagcggaaagatggccgcttcccggccctgctgcagggagctcaaaatggaggacgcggcgctcgggagagcgggcgggtgagtcacccacacaaaggaaaagggcctttccgtcctcagccgtcgcttcatgtgactccacggagtaccgggcgccgtccaggcacctcgattagttctcgagcttttggagtacgtcgtctttaggttggggggaggggttttatgcgatggagtttccccacactgagtgggtggagactgaagttaggccagcttggcacttgatgtaattctccttggaatttgccctttttgagtttggatcttggttcattctcaagcctcagacagtggttcaaagtttttttcttccatttcaggtgtcgtgaggggatctggagctctcgagaattctcacgcgtgccgccaccatggccttaccagtgaccgccttgctcctgccgctggccttgctgctccacgccgccaggccggacatccagatgacacagactacatcctccctgtctgcctctctgggagacagagtcaccatcagttgcagggcaagtcaggacattagtaaatatttaaattggtatcagcagaaaccagatggaactgttaaactcctgatctaccatacatcaagattacactcaggagtcccatcaaggttcagtggcagtgggtctggaacagattattctctcaccattagcaacctggagcaagaagatattgccacttacttttgccaacagggtaatacgcttccgtacacgttcggaggcggcaccaagctggagatcacaggtggcggtggctcgggcggtggtgggtcgggtggcggcggatctgaggtgaaactgcaggagtcaggacctggcctggtggcgccctcacagagcctgtccgtcacatgcactgtctcaggggtctcattacccgactatggtgtaagctggattcgccagcctccacgaaagggtctggagtggctgggagtaatatggggtagtgaaaccacatactataattcagctctcaaatccagactgaccatcatcaaggacaactccaagagccaagttttcttaaaaatgaacagtctgcaaactgatgacacagccatttactactgtgccaaacattattactacggtggtagctatgctatggactactggggccaaggaacctcagtcaccgtctcctcagggaagcctatcccgaaccctctgttgggtctcgatagtaccaatggggccgcaaccacgacgccagcgccgcgaccaccaacaccggcgcccaccatcgcgttgcagcccctgtccctgcgcccagaggcgtgccggccagcggcggggggcgcagtgcacacgagggggctggacttcgcctgtgatttttgggtgctggtggtggttggtggagtcctggcttgctatagcttgctagtaacagtggcctttattattttctgggtgaggagtaagaggagcaggctcctgcacagtgactacatgaacatgactccccgccgccccgggcccacccgcaagcattaccagccctatgccccaccacgcgacttcgcagcctatcgctccggctcaggaagcgatatcgagaagctttgcaaaaaagctgaagaagaggcaaaggaggcgcaagagaaagctgatgagttgcggcaacggcaccccgacagccaggctgctgaggatgctgaggacttggcaaatctggcggtggccgctgtcttgacggcttgcttgttggcccaagaacatccaaacgctgacattgcaaagctttgcattaaggccgcgtccgaagcggctgaagcagcttctaaggcagccgagctggcgcaacggcatcctgactcccaagcggcgagggacgctataaaactcgcatcacaagcagccagagctgtaatcctcgctattatgctcgcagccgaaaacccaaacgctgatattgccaaactgtgtataaaggcggctagtgaagccgcagaagctgcaagcaaagcagcagaacttgcccaacgccaccccgactcccaggcggctagagatgctataaaacttgcttctcaggctgcggaggcggtagaacgagcgatctggctggcagcagagaaccccaacgctgacattgccaaaaagtgtatcaaggcggcttccgaagccgccgaggaggccagcaaagcggcggaagaggcacagagacatccggactcacagaaagcacgcgacgagattaaagaggctagtcaaaaagcagaggaggtaaaagaacgctgtaagtccggcagtggagagggcagaggaagtctgctaacatgcggtgacgtcgaggagaatcctggcccaatgattcatcttggtcacatcctcttcttgctgctgttgccagttgctgccgcacaaacaaccccaggtgagaggtcaagtcttcccgccttctatccgggcacaagcgggagttgtagtgggtgtggatctttgtcccttcctatatacatctgggctcctctggctggcacttgcggagtgcttctgctgagtctggttattaccaaacggggcagaaagaaactcctgtatatattcaaacaaccatttatgagaccagtacaaactactcaagaggaagatggctgtagctgccgatttccagaagaagaagaaggaggatgtgaactgggctgcgtggtcatagtgggcaggatcgtcttgtccggatccggcactagtgcgcccatcacggcgtacgcccagcagacgagaggcctcctagggtgtataatcaccagcctgactggccgggacaaaaaccaagtggagggtgaggtccagatcgtgtcaactgctacccaaaccttcctggcaacgtgcatcaatggggtatgctgggcagtctaccacggggccggaacgaggaccatcgcatcacccaagggtcctgtcatccagatgtataccaatgtggaccaagaccttgtgggctggcccgctcctcaaggttcccgctcattgacaccctgtacctgcggctcctcggacctttacctggtcacgaggcacgccgatgtcattcccgtgcgccggcgaggtgatagcaggggtagcctgctttcgccccggcccatttcctacttgaaaggctccgcggggggtccgctgttgtgccccgcgggacacgccgtgggcctattcagggccgcggtgtgcacccgtggagtggctaaagcggtggactttatccctgtggagaacctagagacaaccatgagatccccggtgttcacggacaactcctctagagtgaagttcagcaggagcgcagacgcccccgcgtacaagcagggccagaaccagctctataacgagctcaatctaggacgaagagaggagtacgatgttttggacaagagacgtggccgggaccctgagatggggggaaagccgagaaggaagaaccctcaggaaggcctgtacaatgaactgcagaaagataagatggcggaggcctacagtgagattgggatgaaaggcgagcgccggaggggcaaggggcacgatggcctttaccagggtctcagtacagccaccaaggacacctacgacgcccttcacatgcaggccctgccccctcgcggcatggtgagcaagggcgaggaggataacatggccatcatcaaggagttcatgcgcttcaaggtgcacatggagggctccgtgaacggccacgagttcgagatcgagggcgagggcgagggccgcccctacgagggcacccagaccgccaagctgaaggtgaccaagggtggccccctgcccttcgcctgggacatcctgtcccctcagttcatgtacggctccaaggcctacgtgaagcaccccgccgacatccccgactacttgaagctgtccttccccgagggcttcaagtgggagcgcgtgatgaacttcgaggacggcggcgtggtgaccgtgacccaggactcctccctgcaggacggcgagttcatctacaaggtgaagctgcgcggcaccaacttcccctccgacggccccgtaatgcagaagaagaccatgggctgggaggcctcctccgagcggatgtaccccgaggacggcgccctgaagggcgagatcaagcagaggctgaagctgaaggacggcggccactacgacgctgaggtcaagaccacctacaaggccaagaagcccgtgcagctgcccggcgcctacaacgtcaacatcaagttggacatcacctcccacaacgaggactacaccatcgtggaacagtacgaacgcgccgagggccgccactccaccggcggcatggacgagctgtacaagtaagcggccgcgactctagagtcgacctgcaggcatgcaagcttgatatcaagcttatcgataatcaacctctggattacaaaatttgtgaaagattgactggtattcttaactatgttgctccttttacgctatgtggatacgctgctttaatgcctttgtatcatgctattgcttcccgtatggctttcattttctcctccttgtataaatcctggttgctgtctctttatgaggagttgtggcccgttgtcaggcaacgtggcgtggtgtgcactgtgtttgctgacgcaacccccactggttggggcattgccaccacctgtcagctcctttccgggactttcgctttccccctccctattgccacggcggaactcatcgccgcctgccttgcccgctgctggacaggggctcggctgttgggcactgacaattccgtggtgttgtcggggaaatcatcgtcctttccttggctgctcgcctgtgttgccacctggattctgcgcgggacgtccttctgctacgtcccttcggccctcaatccagcggaccttccttcccgcggcctgctgccggctctgcggcctcttccgcgtcttcgccttcgccctcagacgagtcggatctccctttgggccgcctccccgcat

SEQ ID NO: 248 - DNA, 13584 bp, Artificial Sequence
  synthetic vector
cgataccgtcgacctcgagggaattaattcgagctcggtacctttaagaccaatgacttacaaggcagctgtagatcttagccactttttaaaagaaaaggggggactggaagggctaattcactcccaacgaagacaagatctgctttttgcttgtactgggtctctctggttagaccagatctgagcctgggagctctctggctaactagggaacccactgcttaagcctcaataaagcttgccttgagtgcttcaagtagtgtgtgcccgtctgttgtgtgactctggtaactagagatccctcagacccttttagtcagtgtggaaaatctctagcagcatctagaattaattccgtgtattctatagtgtcacctaaatcgtatgtgtatgatacataaggttatgtattaattgtagccgcgttctaacgacaatatgtacaagcctaattgtgtagcatctggcttactgaagcagaccctatcatctctctcgtaaactgccgtcagagtcggtttggttggacgaaccttctgagtttctggtaacgccgtcccgcacccggaaatggtcagcgaaccaatcagcagggtcatcgctagccagatcctctacgccggacgcatcgtggccggcatcaccggcgccacaggtgcggttgctggcgcctatatcgccgacatcaccgatggggaagatcgggctcgccacttcgggctcatgagcgcttgtttcggcgtgggtatggtggcaggccccgtggccgggggactgttgggcgccatctccttgcatgcaccattccttgcggcggcggtgctcaacggcctcaacctactactgggctgcttcctaatgcaggagtcgcataagggagagcgtcgaatggtgcactctcagtacaatctgctctgatgccgcatagttaagccagccccgacacccgccaacacccgctgacgcgccctgacgggcttgtctgctcccggcatccgcttacagacaagctgtgaccgtctccgggagctgcatgtgtcagaggttttcaccgtcatcaccgaaacgcgcgagacgaaagggcctcgtgatacgcctatttttataggttaatgtcatgataataatggtttcttagacgtcaggtggcacttttcggggaaatgtgcgcggaacccctatttgtttatttttctaaatacattcaaatatgtatccgctcatgagacaataaccctgataaatgcttcaataatattgaaaaaggaagagtatgagtattcaacatttccgtgtcgcccttattcccttttttgcggcattttgccttcctgtttttgctcacccagaaacgctggtgaaagtaaaagatgctgaagatcagttgggtgcacgagtgggttacatcgaactggatctcaacagcggtaagatccttgagagttttcgccccgaagaacgttttccaatgatgagcacttttaaagttctgctatgtggcgcggtattatcccgtattgacgccgggcaagagcaactcggtcgccgcatacactattctcagaatgacttggttgagtactcaccagtcacagaaaagcatcttacggatggcatgacagtaagagaattatgcagtgctgccataaccatgagtgataacactgcggccaacttacttctgacaacgatcggaggaccgaaggagctaaccgcttttttgcacaacatgggggatcatgtaactcgccttgatcgttgggaaccggagctgaatgaagccataccaaacgacgagcgtgacaccacgatgcctgtagcaatggcaacaacgttgcgcaaactattaactggcgaactacttactctagcttcccggcaacaattaatagactggatggaggcggataaagttgcaggaccacttctgcgctcggcccttccggctggctggtttattgctgataaatctggagccggtgagcgtgggtctcgcggtatcattgcagcactggggccagatggtaagccctcccgtatcgtagttatctacacgacggggagtcaggcaactatggatgaacgaaatagacagatcgctgagataggtgcctcactgattaagcattggtaactgtcagaccaagtttactcatatatactttagattgatttaaaacttcatttttaatttaaaaggatctaggtgaagatcctttttgataatctcatgaccaaaatcccttaacgtgagttttcgttccactgagcgtcagaccccgtagaaaagatcaaaggatcttcttgagatcctttttttctgcgcgtaatctgctgcttgcaaacaaaaaaaccaccgctaccagcggtggtttgtttgccggatcaagagctaccaactctttttccgaaggtaactggcttcagcagagcgcagataccaaatactgtctttctagtgtagccgtagttaggccaccacttcaagaactctgtagcaccgcctacatacctcgctctgctaatcctgttaccagtggctgctgccagtggcgataagtcgtgtcttaccgggttggactcaagacgatagttaccggataaggcgcagcggtcgggctgaacggggggttcgtgcacacagcccagcttggagcgaacgacctacaccgaactgagatacctacagcgtgagctatgagaaagcgccacgcttcccgaagggagaaaggcggacaggtatccggtaagcggcagggtcggaacaggagagcgcacgagggagcttccagggggaaacgcctggtatctttatagtcctgtcgggtttcgccacctctgacttgagcgtcgatttttgtgatgctcgtcaggggggcggagcctatggaaaaacgccagcaacgcggcctttttacggttcctggccttttgctggccttttgctcacatgttctttcctgcgttatcccctgattctgtggataaccgtattaccgcctttgagtgagctgataccgctcgccgcagccgaacgaccgagcgcagcgagtcagtgagcgaggaagcggaagagcgcccaatacgcaaaccgcctctccccgcgcgttggccgattcattaatgcagctgtggaatgtgtgtcagttagggtgtggaaagtccccaggctccccagcaggcagaagtatgcaaagcatgcatctcaattagtcagcaaccaggtgtggaaagtccccaggctccccagcaggcagaagtatgcaaagcatgcatctcaattagtcagcaaccatagtcccgcccctaactccgcccatcccgcccctaactccgcccagttccgcccattctccgccccatggctgactaattttttttatttatgcagaggccgaggccgcctcggcctctgagctattccagaagtagtgaggaggcttttttggaggcctaggcttttgcaaaaagcttggacacaagacaggcttgcgagatatgtttgagaataccactttatcccgcgtcagggagaggcagtgcgtaaaaagacgcggactcatgtgaaatactggtttttagtgcgccagatctctataatctcgcgcaacctattttcccctcgaacactttttaagccgtagataaacaggctgggacacttcacatgagcgaaaaatacatcgtcacctgggacatgttgcagatccatgcacgtaaactcgcaagccgactgatgccttctgaacaatggaaaggcattattgccgtaagccgtggcggtctgtaccgggtgcgttactggcgcgtgaactgggtattcgtcatgtcgataccgtttgtatttccagctacgatcacgacaaccagcgcgagcttaaagtgctgaaacgcgcagaaggcgatggcgaaggcttcatcgttattgatgacctggtggataccggtggtactgcggttgcgattcgtgaaatgtatccaaaagcgcactttgtcaccatcttcgcaaaaccggctggtcgtccgctggttgatgactatgttgttgatatcccgcaagatacctggattgaacagccgtgggatatgggcgtcgtattcgtcccgccaatctccggtcgctaatcttttcaacgcctggcactgccgggcgttgttctttttaacttcaggcgggttacaatagtttccagtaagtattctggaggctgcatccatgacacaggcaaacctgagcgaaaccctgttcaaaccccgctttaaacatcctgaaacctcgacgctagtccgccgctttaatcacggcgcacaaccgcctgtgcagtcggcccttgatggtaaaaccatccctcactggtatcgcatgattaaccgtctgatgtggatctggcgcggcattgacccacgcgaaatcctcgacgtccaggcacgtattgtgatgagcgatgccgaacgtaccgacgatgatttatacgatacggtgattggctaccgtggcggcaactggatttatgagtgggccccggatctttgtgaaggaaccttacttctgtggtgtgacataattggacaaactacctacagagatttaaagctctaaggtaaatataaaatttttaagtgtataatgtgttaaactactgattctaattgtttgtgtattttagattccaacctatggaactgatgaatgggagcagtggtggaatgcctttaatgaggaaaacctgttttgctcagaagaaatgccatctagtgatgatgaggctactgctgactctcaacattctactcctccaaaaaagaagagaaaggtagaagaccccaaggactttccttcagaattgctaagttttttgagtcatgctgtgtttagtaatagaactcttgcttgctttgctatttacaccacaaaggaaaaagctgcactgctatacaagaaaattatggaaaaatattctgtaacctttataagtaggcataacagttataatcataacatactgttttttcttactccacacaggcatagagtgtctgctattaataactatgctcaaaaattgtgtacctttagctttttaatttgtaaaggggttaataaggaatatttgatgtatagtgccttgactagagatcataatcagccataccacatttgtagaggttttacttgctttaaaaaacctcccacacctccccctgaacctgaaacataaaatgaatgcaattgttgttgttaacttgtttattgcagcttataatggttacaaataaagcaatagcatcacaaatttcacaaataaagcatttttttcactgcattctagttgtggtttgtccaaactcatcaatgtatcttatcatgtctggatcaactggataactcaagctaaccaaaatcatcccaaacttcccaccccataccctattaccactgccaattacctagtggtttcatttactctaaacctgtgattcctctgaattattttcattttaaagaaattgtatttgttaaatatgtactacaaacttagtagttggaagggctaattcactcccaaagaagacaagatatccttgatctgtggatctaccacacacaaggctacttccctgattagcagaactacacaccagggccaggggtcagatatccactgacctttggatggtgctacaagctagtaccagttgagccagataaggtagaagaggccaataaaggagagaacaccagcttgttacaccctgtgagcctgcatgggatggatgacccggagagagaagtgttagagtggaggtttgacagccgcctagcatttcatcacgtggcccgagagctgcatccggagtacttcaagaactgctgatatcgagcttgctacaagggactttccgctggggactttccagggaggcgtggcctgggcgggactggggagtggcgagccctcagatcctgcatataagcagctgctttttgcctgtactgggtctctctggttagaccagatctgagcctgggagctctctggctaactagggaacccactgcttaagcctcaataaagcttgccttgagtgcttcaagtagtgtgtgcccgtctgttgtgtgactctggtaactagagatccctcagacccttttagtcagtgtggaaaatctctagcagtggcgcccgaacagggacttgaaagcgaaagggaaaccagaggagctctctcgacgcaggactcggcttgctgaagcgcgcacggcaagaggcgaggggcggcgactggtgagtacgccaaaaattttgactagcggaggctagaaggagagagatgggtgcgagagcgtcagtattaagcgggggagaattagatcgcgatgggaaaaaattcggttaaggccagggggaaagaaaaaatataaattaaaacatatagtatgggcaagcagggagctagaacgattcgcagttaatcctggcctgttagaaacatcagaaggctgtagacaaatactgggacagctacaaccatcccttcagacaggatcagaagaacttagatcattatataatacagtagcaaccctctattgtgtgcatcaaaggatagagataaaagacaccaaggaagctttagacaagatagaggaagagcaaaacaaaagtaagaccaccgcacagcaagcggccggccgctgatcttcagacctggaggaggagatatgagggacaattggagaagtgaattatataaatataaagtagtaaaaattgaaccattaggagtagcacccaccaaggcaaagagaagagtggtgcagagagaaaaaagagcagtgggaataggagctttgttccttgggttcttgggagcagcaggaagcactatgggcgcagcgtcaatgacgctgacggtacaggccagacaattattgtctggtatagtgcagcagcagaacaatttgctgagggctattgaggcgcaacagcatctgttgcaactcacagtctggggcatcaagcagctccaggcaagaatcctggctgtgaaagatacctaaaggatcaacagctcctggggatttggggttgctctggaaaactcatttgcaccactgctgtgccttggaatgctagttggagtaataaatctctggaacagatttggaatcacacgacctggatggagtgggacagagaaattaacaattacacaagcttaatacactccttaattgaagaatcgcaaaaccagcaagaaaagaatgaacaagaattattggaattagataaatgggcaagtttgtggaattggtttaacataacaaattggctgtggtatataaaattattcataatgatagtaggaggcttggtaggtttaagaatagtttttgctgtactttctatagtgaatagagttaggcagggatattcaccattatcgtttcagacccacctcccaaccccgaggggacccgacaggcccgaaggaatagaagaagaaggtggagagagagacagagacagatccattcgattagtgaacggatctcgacggtatcgccaaatggcagtattcatccacaattttaaaagaaaaggggggattggggggtacagtgcaggggaaagaatagtagacataatagcaacagacatacaaactaaagaattacaaaaacaaattacaaaaattcaaaattttcgggtttattacagggacagcagagatccagtttggatcgataagcttgatatcgaattcctgcagcccgtgaggctccggtgcccgtcagtgggcagagcgcacatcgcccacagtccccgagaagttggggggaggggtcggcaattgaaccggtgcctagagaaggtggcgcggggtaaactgggaaagtgatgtcgtgtactggctccgcctttttcccgagggtgggggagaaccgtatataagtgcagtagtcgccgtgaacgttctttttcgcaacgggtttgccgccagaacacaggtaagtgccgtgtgtggttcccgcgggcctggcctctttacgggttatggcccttgcgtgccttgaattacttccacctggctgcagtacgtgattcttgatcccgagcttcgggttggaagtgggtgggagagttcgaggccttgcgcttaaggagccccttcgcctcgtgcttgagttgaggcctggcctgggcgctggggccgccgcgtgcgaatctggtggcaccttcgcgcctgtctcgctgctttcgataagtctctagccatttaaaatttttgatgacctgctgcgacgctttttttctggcaagatagtcttgtaaatgcgggccaagatctgcacactggtatttcggtttttggggccgcgggcggcgacggggcccgtgcgtcccagcgcacatgttcggcgaggcggggcctgcgagcgcggccaccgagaatcggacgggggtagtctcaagctggccggcctgctctggtgcctggcctcgcgccgccgtgtatcgccccgccctgggcggcaaggctggcccggtcggcaccagttgcgtgagcggaaagatggccgcttcccggccctgctgcagggagctcaaaatggaggacgcggcgctcgggagagcgggcgggtgagtcacccacacaaaggaaaagggcctttccgtcctcagccgtcgcttcatgtgactccacggagtaccgggcgccgtccaggcacctcgattagttctcgagcttttggagtacgtcgtctttaggttggggggaggggttttatgcgatggagtttccccacactgagtgggtggagactgaagttaggccagcttggcacttgatgtaattctccttggaatttgccctttttgagtttggatcttggttcattctcaagcctcagacagtggttcaaagtttttttcttccatttcaggtgtcgtgaggggatctggagctctcgagaattctcacgcgtgccgccaccatggccttaccagtgaccgccttgctcctgccgctggccttgctgctccacgccgccaggccggacatccagatgacacagactacatcctccctgtctgcctctctgggagacagagtcaccatcagttgcagggcaagtcaggacattagtaaatatttaaattggtatcagcagaaaccagatggaactgttaaactcctgatctaccatacatcaagattacactcaggagtcccatcaaggttcagtggcagtgggtctggaacagattattctctcaccattagcaacctggagcaagaagatattgccacttacttttgccaacagggtaatacgcttccgtacacgttcggaggcggcaccaagctggagatcacaggtggcggtggctcgggcggtggtgggtcgggtggcggcggatctgaggtgaaactgcaggagtcaggacctggcctggtggcgccctcacagagcctgtccgtcacatgcactgtctcaggggtctcattacccgactatggtgtaagctggattcgccagcctccacgaaagggtctggagtggctgggagtaatatggggtagtgaaaccacatactataattcagctctcaaatccagactgaccatcatcaaggacaactccaagagccaagttttcttaaaaatgaacagtctgcaaactgatgacacagccatttactactgtgccaaacattattactacggtggtagctatgctatggactactggggccaaggaacctcagtcaccgtctcctcagggaagcctatcccgaaccctctgttgggtctcgatagtaccaatggggccgcaaccacgacgccagcgccgcgaccaccaacaccggcgcccaccatcgcgttgcagcccctgtccctgcgcccagaggcgtgccggccagcggcggggggcgcagtgcacacgagggggctggacttcgcctgtgatttttgggtgctggtggtggttggtggagtcctggcttgctatagcttgctagtaacagtggcctttattattttctgggtgaggagtaagaggagcaggctcctgcacagtgactacatgaacatgactccccgccgccccgggcccacccgcaagcattaccagccctatgccccaccacgcgacttcgcagcctatcgctccggctcaggaagcgatatcgagaagctttgcaaaaaagctgaagaagaggcaaaggaggcgcaagagaaagctgatgagttgcggcaacggcaccccgacagccaggctgctgaggatgctgaggacttggcaaatctggcggtggccgctgtcttgacggcttgcttgttggcccaagaacatccaaacgctgacattgcaaagctttgcattaaggccgcgtccgaagcggctgaagcagcttctaaggcagccgagctggcgcaacggcatcctgactcccaagcggcgagggacgctataaaactcgcatcacaagcagccagagctgtaatcctcgctattatgctcgcagccgaaaacccaaacgctgatattgccaaactgtgtataaaggcggctagtgaagccgcagaagctgcaagcaaagcagcagaacttgcccaacgccaccccgactcccaggcggctagagatgctataaaacttgcttctcaggctgcggaggcggtagaacgagcgatctggctggcagcagagaaccccaacgctgacattgccaaaaagtgtatcaaggcggcttccgaagccgccgaggaggccagcaaagcggcggaagaggcacagagacatccggactcacagaaagcacgcgacgagattaaagaggctagtcaaaaagcagaggaggtaaaagaacgctgtaagtccggcagtggagagggcagaggaagtctgctaacatgcggtgacgtcgaggagaatcctggcccaatgattcatcttggtcacatcctcttcttgctgctgttgccagttgctgccgcacaaacaaccccaggtgagaggtcaagtcttcccgccttctatccgggcacaagcgggagttgtagtgggtgtggatctttgtcccttcctatatacatctgggctcctctggctggcacttgcggagtgcttctgctgagtctggttattaccaaacggggcagaaagaaactcctgtatatattcaaacaaccatttatgagaccagtacaaactactcaagaggaagatggctgtagctgccgatttccagaagaagaagaaggaggatgtgaactgggctgcgtggtcatagtgggcaggatcgtcttgtccggatccggcactagtatcacggcctactcccaacagacgcggggcctacttggttgcatcatcactagcctcacaggccgggacaagaaccaggtcgaaggggaggttcaagtggtttctaccgcaacacaatctttcctggcgacctgcgtcaacggcgtgtgctggactgtctaccatggcgctggctcgaagaccctagccggtccaaaaggtccaatcacccaaatgtacaccaatgtagaccaggacctcgtcggctggcaggcgcctccaggggcgcgctccttgacaccatgcacctgtggcagctcggacctttacttggtcacgagacatgctgatgtcattccggtgcgccggcgaggcgacagcaggggaagtctactctcccccaggcccgtctcctacctgaaaggctccgcaggtggtccattgctttgcccttcggggcacgctgtgggcatcttccgggctgctgtgtgcacccggggggtcgcgaaggcggtggacttcgtgcccgttgagtctatggaaactaccatgcggtctagagtgaagttcagcaggagcgcagacgcccccgcgtacaagcagggccagaaccagctctataacgagctcaatctaggacgaagagaggagtacgatgttttggacaagagacgtggccgggaccctgagatggggggaaagccgagaaggaagaaccctcaggaaggcctgtacaatgaactgcagaaagataagatggcggaggcctacagtgagattgggatgaaaggcgagcgccggaggggcaaggggcacgatggcctttaccagggtctcagtacagccaccaaggacacctacgacgcccttcacatgcaggccctgccccctcgcggcatggtgagcaagggcgaggaggataacatggccatcatcaaggagttcatgcgcttcaaggtgcacatggagggctccgtgaacggccacgagttcgagatcgagggcgagggcgagggccgcccctacgagggcacccagaccgccaagctgaaggtgaccaagggtggccccctgcccttcgcctgggacatcctgtcccctcagttcatgtacggctccaaggcctacgtgaagcaccccgccgacatccccgactacttgaagctgtccttccccgagggcttcaagtgggagcgcgtgatgaacttcgaggacggcggcgtggtgaccgtgacccaggactcctccctgcaggacggcgagttcatctacaaggtgaagctgcgcggcaccaacttcccctccgacggccccgtaatgcagaagaagaccatgggctgggaggcctcctccgagcggatgtaccccgaggacggcgccctgaagggcgagatcaagcagaggctgaagctgaaggacggcggccactacgacgctgaggtcaagaccacctacaaggccaagaagcccgtgcagctgcccggcgcctacaacgtcaacatcaagttggacatcacctcccacaacgaggactacaccatcgtggaacagtacgaacgcgccgagggccgccactccaccggcggcatggacgagctgtacaagtaagcggccgcgactctagagtcgacctgcaggcatgcaagcttgatatcaagcttatcgataatcaacctctggattacaaaatttgtgaaagattgactggtattcttaactatgttgctccttttacgctatgtggatacgctgctttaatgcctttgtatcatgctattgcttcccgtatggctttcattttctcctccttgtataaatcctggttgctgtctctttatgaggagttgtggcccgttgtcaggcaacgtggcgtggtgtgcactgtgtttgctgacgcaacccccactggttggggcattgccaccacctgtcagctcctttccgggactttcgctttccccctccctattgccacggcggaactcatcgccgcctgccttgcccgctgctggacaggggctcggctgttgggcactgacaattccgtggtgttgtcggggaaatcatcgtcctttccttggctgctcgcctgtgttgccacctggattctgcgcgggacgtccttctgctacgtcccttcggccctcaatccagcggaccttccttcccgcggcctgctgccggctctgcggcctcttccgcgtcttcgccttcgccctcagacgagtcggatctccctttgggccgcctccccgcat

SEQ ID NO: 249 - DNA, 13740 bp, Artificial Sequence
  synthetic vector
cgataccgtcgacctcgagggaattaattcgagctcggtacctttaagaccaatgacttacaaggcagctgtagatcttagccactttttaaaagaaaaggggggactggaagggctaattcactcccaacgaagacaagatctgctttttgcttgtactgggtctctctggttagaccagatctgagcctgggagctctctggctaactagggaacccactgcttaagcctcaataaagcttgccttgagtgcttcaagtagtgtgtgcccgtctgttgtgtgactctggtaactagagatccctcagacccttttagtcagtgtggaaaatctctagcagcatctagaattaattccgtgtattctatagtgtcacctaaatcgtatgtgtatgatacataaggttatgtattaattgtagccgcgttctaacgacaatatgtacaagcctaattgtgtagcatctggcttactgaagcagaccctatcatctctctcgtaaactgccgtcagagtcggtttggttggacgaaccttctgagtttctggtaacgccgtcccgcacccggaaatggtcagcgaaccaatcagcagggtcatcgctagccagatcctctacgccggacgcatcgtggccggcatcaccggcgccacaggtgcggttgctggcgcctatatcgccgacatcaccgatggggaagatcgggctcgccacttcgggctcatgagcgcttgtttcggcgtgggtatggtggcaggccccgtggccgggggactgttgggcgccatctccttgcatgcaccattccttgcggcggcggtgctcaacggcctcaacctactactgggctgcttcctaatgcaggagtcgcataagggagagcgtcgaatggtgcactctcagtacaatctgctctgatgccgcatagttaagccagccccgacacccgccaacacccgctgacgcgccctgacgggcttgtctgctcccggcatccgcttacagacaagctgtgaccgtctccgggagctgcatgtgtcagaggttttcaccgtcatcaccgaaacgcgcgagacgaaagggcctcgtgatacgcctatttttataggttaatgtcatgataataatggtttcttagacgtcaggtggcacttttcggggaaatgtgcgcggaacccctatttgtttatttttctaaatacattcaaatatgtatccgctcatgagacaataaccctgataaatgcttcaataatattgaaaaaggaagagtatgagtattcaacatttccgtgtcgcccttattcccttttttgcggcattttgccttcctgtttttgctcacccagaaacgctggtgaaagtaaaagatgctgaagatcagttgggtgcacgagtgggttacatcgaactggatctcaacagcggtaagatccttgagagttttcgccccgaagaacgttttccaatgatgagcacttttaaagttctgctatgtggcgcggtattatcccgtattgacgccgggcaagagcaactcggtcgccgcatacactattctcagaatgacttggttgagtactcaccagtcacagaaaagcatcttacggatggcatgacagtaagagaattatgcagtgctgccataaccatgagtgataacactgcggccaacttacttctgacaacgatcggaggaccgaaggagctaaccgcttttttgcacaacatgggggatcatgtaactcgccttgatcgttgggaaccggagctgaatgaagccataccaaacgacgagcgtgacaccacgatgcctgtagcaatggcaacaacgttgcgcaaactattaactggcgaactacttactctagcttcccggcaacaattaatagactggatggaggcggataaagttgcaggaccacttctgcgctcggcccttccggctggctggtttattgctgataaatctggagccggtgagcgtgggtctcgcggtatcattgcagcactggggccagatggtaagccctcccgtatcgtagttatctacacgacggggagtcaggcaactatggatgaacgaaatagacagatcgctgagataggtgcctcactgattaagcattggtaactgtcagaccaagtttactcatatatactttagattgatttaaaacttcatttttaatttaaaaggatctaggtgaagatcctttttgataatctcatgaccaaaatcccttaacgtgagttttcgttccactgagcgtcagaccccgtagaaaagatcaaaggatcttcttgagatcctttttttctgcgcgtaatctgctgcttgcaaacaaaaaaaccaccgctaccagcggtggtttgtttgccggatcaagagctaccaactctttttccgaaggtaactggcttcagcagagcgcagataccaaatactgtctttctagtgtagccgtagttaggccaccacttcaagaactctgtagcaccgcctacatacctcgctctgctaatcctgttaccagtggctgctgccagtggcgataagtcgtgtcttaccgggttggactcaagacgatagttaccggataaggcgcagcggtcgggctgaacggggggttcgtgcacacagcccagcttggagcgaacgacctacaccgaactgagatacctacagcgtgagctatgagaaagcgccacgcttcccgaagggagaaaggcggacaggtatccggtaagcggcagggtcggaacaggagagcgcacgagggagcttccagggggaaacgcctggtatctttatagtcctgtcgggtttcgccacctctgacttgagcgtcgatttttgtgatgctcgtcaggggggcggagcctatggaaaaacgccagcaacgcggcctttttacggttcctggccttttgctggccttttgctcacatgttctttcctgcgttatcccctgattctgtggataaccgtattaccgcctttgagtgagctgataccgctcgccgcagccgaacgaccgagcgcagcgagtcagtgagcgaggaagcggaagagcgcccaatacgcaaaccgcctctccccgcgcgttggccgattcattaatgcagctgtggaatgtgtgtcagttagggtgtggaaagtccccaggctccccagcaggcagaagtatgcaaagcatgcatctcaattagtcagcaaccaggtgtggaaagtccccaggctccccagcaggcagaagtatgcaaagcatgcatctcaattagtcagcaaccatagtcccgcccctaactccgcccatcccgcccctaactccgcccagttccgcccattctccgccccatggctgactaattttttttatttatgcagaggccgaggccgcctcggcctctgagctattccagaagtagtgaggaggcttttttggaggcctaggcttttgcaaaaagcttggacacaagacaggcttgcgagatatgtttgagaataccactttatcccgcgtcagggagaggcagtgcgtaaaaagacgcggactcatgtgaaatactggtttttagtgcgccagatctctataatctcgcgcaacctattttcccctcgaacactttttaagccgtagataaacaggctgggacacttcacatgagcgaaaaatacatcgtcacctgggacatgttgcagatccatgcacgtaaactcgcaagccgactgatgccttctgaacaatggaaaggcattattgccgtaagccgtggcggtctgtaccgggtgcgttactggcgcgtgaactgggtattcgtcatgtcgataccgtttgtatttccagctacgatcacgacaaccagcgcgagcttaaagtgctgaaacgcgcagaaggcgatggcgaaggcttcatcgttattgatgacctggtggataccggtggtactgcggttgcgattcgtgaaatgtatccaaaagcgcactttgtcaccatcttcgcaaaaccggctggtcgtccgctggttgatgactatgttgttgatatcccgcaagatacctggattgaacagccgtgggatatgggcgtcgtattcgtcccgccaatctccggtcgctaatcttttcaacgcctggcactgccgggcgttgttctttttaacttcaggcgggttacaatagtttccagtaagtattctggaggctgcatccatgacacaggcaaacctgagcgaaaccctgttcaaaccccgctttaaacatcctgaaacctcgacgctagtccgccgctttaatcacggcgcacaaccgcctgtgcagtcggcccttgatggtaaaaccatccctcactggtatcgcatgattaaccgtctgatgtggatctggcgcggcattgacccacgcgaaatcctcgacgtccaggcacgtattgtgatgagcgatgccgaacgtaccgacgatgatttatacgatacggtgattggctaccgtggcggcaactggatttatgagtgggccccggatctttgtgaaggaaccttacttctgtggtgtgacataattggacaaactacctacagagatttaaagctctaaggtaaatataaaatttttaagtgtataatgtgttaaactactgattctaattgtttgtgtattttagattccaacctatggaactgatgaatgggagcagtggtggaatgcctttaatgaggaaaacctgttttgctcagaagaaatgccatctagtgatgatgaggctactgctgactctcaacattctactcctccaaaaaagaagagaaaggtagaagaccccaaggactttccttcagaattgctaagttttttgagtcatgctgtgtttagtaatagaactcttgcttgctttgctatttacaccacaaaggaaaaagctgcactgctatacaagaaaattatggaaaaatattctgtaacctttataagtaggcataacagttataatcataacatactgttttttcttactccacacaggcatagagtgtctgctattaataactatgctcaaaaattgtgtacctttagctttttaatttgtaaaggggttaataaggaatatttgatgtatagtgccttgactagagatcataatcagccataccacatttgtagaggttttacttgctttaaaaaacctcccacacctccccctgaacctgaaacataaaatgaatgcaattgttgttgttaacttgtttattgcagcttataatggttacaaataaagcaatagcatcacaaatttcacaaataaagcatttttttcactgcattctagttgtggtttgtccaaactcatcaatgtatcttatcatgtctggatcaactggataactcaagctaaccaaaatcatcccaaacttcccaccccataccctattaccactgccaattacctagtggtttcatttactctaaacctgtgattcctctgaattattttcattttaaagaaattgtatttgttaaatatgtactacaaacttagtagttggaagggctaattcactcccaaagaagacaagatatccttgatctgtggatctaccacacacaaggctacttccctgattagcagaactacacaccagggccaggggtcagatatccactgacctttggatggtgctacaagctagtaccagttgagccagataaggtagaagaggccaataaaggagagaacaccagcttgttacaccctgtgagcctgcatgggatggatgacccggagagagaagtgttagagtggaggtttgacagccgcctagcatttcatcacgtggcccgagagctgcatccggagtacttcaagaactgctgatatcgagcttgctacaagggactttccgctggggactttccagggaggcgtggcctgggcgggactggggagtggcgagccctcagatcctgcatataagcagctgctttttgcctgtactgggtctctctggttagaccagatctgagcctgggagctctctggctaactagggaacccactgcttaagcctcaataaagcttgccttgagtgcttcaagtagtgtgtgcccgtctgttgtgtgactctggtaactagagatccctcagacccttttagtcagtgtggaaaatctctagcagtggcgcccgaacagggacttgaaagcgaaagggaaaccagaggagctctctcgacgcaggactcggcttgctgaagcgcgcacggcaagaggcgaggggcggcgactggtgagtacgccaaaaattttgactagcggaggctagaaggagagagatgggtgcgagagcgtcagtattaagcgggggagaattagatcgcgatgggaaaaaattcggttaaggccagggggaaagaaaaaatataaattaaaacatatagtatgggcaagcagggagctagaacgattcgcagttaatcctggcctgttagaaacatcagaaggctgtagacaaatactgggacagctacaaccatcccttcagacaggatcagaagaacttagatcattatataatacagtagcaaccctctattgtgtgcatcaaaggatagagataaaagacaccaaggaagctttagacaagatagaggaagagcaaaacaaaagtaagaccaccgcacagcaagcggccggccgctgatcttcagacctggaggaggagatatgagggacaattggagaagtgaattatataaatataaagtagtaaaaattgaaccattaggagtagcacccaccaaggcaaagagaagagtggtgcagagagaaaaaagagcagtgggaataggagctttgttccttgggttcttgggagcagcaggaagcactatgggcgcagcgtcaatgacgctgacggtacaggccagacaattattgtctggtatagtgcagcagcagaacaatttgctgagggctattgaggcgcaacagcatctgttgcaactcacagtctggggcatcaagcagctccaggcaagaatcctggctgtgaaagatacctaaaggatcaacagctcctggggatttggggttgctctggaaaactcatttgcaccactgctgtgccttggaatgctagttggagtaataaatctctggaacagatttggaatcacacgacctggatggagtgggacagagaaattaacaattacacaagcttaatacactccttaattgaagaatcgcaaaaccagcaagaaaagaatgaacaagaattattggaattagataaatgggcaagtttgtggaattggtttaacataacaaattggctgtggtatataaaattattcataatgatagtaggaggcttggtaggtttaagaatagtttttgctgtactttctatagtgaatagagttaggcagggatattcaccattatcgtttcagacccacctcccaaccccgaggggacccgacaggcccgaaggaatagaagaagaaggtggagagagagacagagacagatccattcgattagtgaacggatctcgacggtatcgccaaatggcagtattcatccacaattttaaaagaaaaggggggattggggggtacagtgcaggggaaagaatagtagacataatagcaacagacatacaaactaaagaattacaaaaacaaattacaaaaattcaaaattttcgggtttattacagggacagcagagatccagtttggatcgataagcttgatatcgaattcctgcagcccgtgaggctccggtgcccgtcagtgggcagagcgcacatcgcccacagtccccgagaagttggggggaggggtcggcaattgaaccggtgcctagagaaggtggcgcggggtaaactgggaaagtgatgtcgtgtactggctccgcctttttcccgagggtgggggagaaccgtatataagtgcagtagtcgccgtgaacgttctttttcgcaacgggtttgccgccagaacacaggtaagtgccgtgtgtggttcccgcgggcctggcctctttacgggttatggcccttgcgtgccttgaattacttccacctggctgcagtacgtgattcttgatcccgagcttcgggttggaagtgggtgggagagttcgaggccttgcgcttaaggagccccttcgcctcgtgcttgagttgaggcctggcctgggcgctggggccgccgcgtgcgaatctggtggcaccttcgcgcctgtctcgctgctttcgataagtctctagccatttaaaatttttgatgacctgctgcgacgctttttttctggcaagatagtcttgtaaatgcgggccaagatctgcacactggtatttcggtttttggggccgcgggcggcgacggggcccgtgcgtcccagcgcacatgttcggcgaggcggggcctgcgagcgcggccaccgagaatcggacgggggtagtctcaagctggccggcctgctctggtgcctggcctcgcgccgccgtgtatcgccccgccctgggcggcaaggctggcccggtcggcaccagttgcgtgagcggaaagatggccgcttcccggccctgctgcagggagctcaaaatggaggacgcggcgctcgggagagcgggcgggtgagtcacccacacaaaggaaaagggcctttccgtcctcagccgtcgcttcatgtgactccacggagtaccgggcgccgtccaggcacctcgattagttctcgagcttttggagtacgtcgtctttaggttggggggaggggttttatgcgatggagtttccccacactgagtgggtggagactgaagttaggccagcttggcacttgatgtaattctccttggaatttgccctttttgagtttggatcttggttcattctcaagcctcagacagtggttcaaagtttttttcttccatttcaggtgtcgtgaggggatctggagctctcgagaattctcacgcgtgccgccaccatggccttaccagtgaccgccttgctcctgccgctggccttgctgctccacgccgccaggccggacatccagatgacacagactacatcctccctgtctgcctctctgggagacagagtcaccatcagttgcagggcaagtcaggacattagtaaatatttaaattggtatcagcagaaaccagatggaactgttaaactcctgatctaccatacatcaagattacactcaggagtcccatcaaggttcagtggcagtgggtctggaacagattattctctcaccattagcaacctggagcaagaagatattgccacttacttttgccaacagggtaatacgcttccgtacacgttcggaggcggcaccaagctggagatcacaggtggcggtggctcgggcggtggtgggtcgggtggcggcggatctgaggtgaaactgcaggagtcaggacctggcctggtggcgccctcacagagcctgtccgtcacatgcactgtctcaggggtctcattacccgactatggtgtaagctggattcgccagcctccacgaaagggtctggagtggctgggagtaatatggggtagtgaaaccacatactataattcagctctcaaatccagactgaccatcatcaaggacaactccaagagccaagttttcttaaaaatgaacagtctgcaaactgatgacacagccatttactactgtgccaaacattattactacggtggtagctatgctatggactactggggccaaggaacctcagtcaccgtctcctcagggaagcctatcccgaaccctctgttgggtctcgatagtaccaatggggccgcaaccacgacgccagcgccgcgaccaccaacaccggcgcccaccatcgcgttgcagcccctgtccctgcgcccagaggcgtgccggccagcggcggggggcgcagtgcacacgagggggctggacttcgcctgtgatttttgggtgctggtggtggttggtggagtcctggcttgctatagcttgctagtaacagtggcctttattattttctgggtgaggagtaagaggagcaggctcctgcacagtgactacatgaacatgactccccgccgccccgggcccacccgcaagcattaccagccctatgccccaccacgcgacttcgcagcctatcgctccaaacggggcagaaagaaactcctgtatatattcaaacaaccatttatgagaccagtacaaactactcaagaggaagatggctgtagctgccgatttccagaagaagaagaaggaggatgtgaactgggctcaggaagcgatatcgagaagctttgcaaaaaagctgaagaagaggcaaaggaggcgcaagagaaagctgatgagttgcggcaacggcaccccgacagccaggctgctgaggatgctgaggacttggcaaatctggcggtggccgctgtcttgacggcttgcttgttggcccaagaacatccaaacgctgacattgcaaagctttgcattaaggccgcgtccgaagcggctgaagcagcttctaaggcagccgagctggcgcaacggcatcctgactcccaagcggcgagggacgctataaaactcgcatcacaagcagccagagctgtaatcctcgctattatgctcgcagccgaaaacccaaacgctgatattgccaaactgtgtataaaggcggctagtgaagccgcagaagctgcaagcaaagcagcagaacttgcccaacgccaccccgactcccaggcggctagagatgctataaaacttgcttctcaggctgcggaggcggtagaacgagcgatctggctggcagcagagaaccccaacgctgacattgccaaaaagtgtatcaaggcggcttccgaagccgccgaggaggccagcaaagcggcggaagaggcacagagacatccggactcacagaaagcacgcgacgagattaaagaggctagtcaaaaagcagaggaggtaaaagaacgctgtaagtccggcagtggagagggcagaggaagtctgctaacatgcggtgacgtcgaggagaatcctggcccaatgattcatcttggtcacatcctcttcttgctgctgttgccagttgctgccgcacaaacaaccccaggtgagaggtcaagtcttcccgccttctatccgggcacaagcgggagttgtagtgggtgtggatctttgtcccttcctatatacatctgggctcctctggctggcacttgcggagtgcttctgctgagtctggttattaccaaacggggcagaaagaaactcctgtatatattcaaacaaccatttatgagaccagtacaaactactcaagaggaagatggctgtagctgccgatttccagaagaagaagaaggaggatgtgaactgggctgcgtggtcatagtgggcaggatcgtcttgtccggatccggcactagtgcgcccatcacggcgtacgcccagcagacgagaggcctcctagggtgtataatcaccagcctgactggccgggacaaaaaccaagtggagggtgaggtccagatcgtgtcaactgctacccaaaccttcctggcaacgtgcatcaatggggtatgctgggcagtctaccacggggccggaacgaggaccatcgcatcacccaagggtcctgtcatccagatgtataccaatgtggaccaagaccttgtgggctggcccgctcctcaaggttcccgctcattgacaccctgtacctgcggctcctcggacctttacctggtcacgaggcacgccgatgtcattcccgtgcgccggcgaggtgatagcaggggtagcctgctttcgccccggcccatttcctacttgaaaggctccgcggggggtccgctgttgtgccccgcgggacacgccgtgggcctattcagggccgcggtgtgcacccgtggagtggctaaagcggtggactttatccctgtggagaacctagagacaaccatgagatccccggtgttcacggacaactcctctagagtgaagttcagcaggagcgcagacgcccccgcgtacaagcagggccagaaccagctctataacgagctcaatctaggacgaagagaggagtacgatgttttggacaagagacgtggccgggaccctgagatggggggaaagccgagaaggaagaaccctcaggaaggcctgtacaatgaactgcagaaagataagatggcggaggcctacagtgagattgggatgaaaggcgagcgccggaggggcaaggggcacgatggcctttaccagggtctcagtacagccaccaaggacacctacgacgcccttcacatgcaggccctgccccctcgcggcatggtgagcaagggcgaggaggataacatggccatcatcaaggagttcatgcgcttcaaggtgcacatggagggctccgtgaacggccacgagttcgagatcgagggcgagggcgagggccgcccctacgagggcacccagaccgccaagctgaaggtgaccaagggtggccccctgcccttcgcctgggacatcctgtcccctcagttcatgtacggctccaaggcctacgtgaagcaccccgccgacatccccgactacttgaagctgtccttccccgagggcttcaagtgggagcgcgtgatgaacttcgaggacggcggcgtggtgaccgtgacccaggactcctccctgcaggacggcgagttcatctacaaggtgaagctgcgcggcaccaacttcccctccgacggccccgtaatgcagaagaagaccatgggctgggaggcctcctccgagcggatgtaccccgaggacggcgccctgaagggcgagatcaagcagaggctgaagctgaaggacggcggccactacgacgctgaggtcaagaccacctacaaggccaagaagcccgtgcagctgcccggcgcctacaacgtcaacatcaagttggacatcacctcccacaacgaggactacaccatcgtggaacagtacgaacgcgccgagggccgccactccaccggcggcatggacgagctgtacaagtaagcggccgcgactctagagtcgacctgcaggcatgcaagcttgatatcaagcttatcgataatcaacctctggattacaaaatttgtgaaagattgactggtattcttaactatgttgctccttttacgctatgtggatacgctgctttaatgcctttgtatcatgctattgcttcccgtatggctttcattttctcctccttgtataaatcctggttgctgtctctttatgaggagttgtggcccgttgtcaggcaacgtggcgtggtgtgcactgtgtttgctgacgcaacccccactggttggggcattgccaccacctgtcagctcctttccgggactttcgctttccccctccctattgccacggcggaactcatcgccgcctgccttgcccgctgctggacaggggctcggctgttgggcactgacaattccgtggtgttgtcggggaaatcatcgtcctttccttggctgctcgcctgtgttgccacctggattctgcgcgggacgtccttctgctacgtcccttcggccctcaatccagcggaccttccttcccgcggcctgctgccggctctgcggcctcttccgcgtcttcgccttcgccctcagacgagtcggatctccctttgggccgcctccccgcat

SEQ ID NO: 250 - DNA, 11542 bp, Artificial Sequence
  synthetic vector
cgataccgtcgacctcgagggaattaattcgagctcggtacctttaagaccaatgacttacaaggcagctgtagatcttagccactttttaaaagaaaaggggggactggaagggctaattcactcccaacgaagacaagatctgctttttgcttgtactgggtctctctggttagaccagatctgagcctgggagctctctggctaactagggaacccactgcttaagcctcaataaagcttgccttgagtgcttcaagtagtgtgtgcccgtctgttgtgtgactctggtaactagagatccctcagacccttttagtcagtgtggaaaatctctagcagcatctagaattaattccgtgtattctatagtgtcacctaaatcgtatgtgtatgatacataaggttatgtattaattgtagccgcgttctaacgacaatatgtacaagcctaattgtgtagcatctggcttactgaagcagaccctatcatctctctcgtaaactgccgtcagagtcggtttggttggacgaaccttctgagtttctggtaacgccgtcccgcacccggaaatggtcagcgaaccaatcagcagggtcatcgctagccagatcctctacgccggacgcatcgtggccggcatcaccggcgccacaggtgcggttgctggcgcctatatcgccgacatcaccgatggggaagatcgggctcgccacttcgggctcatgagcgcttgtttcggcgtgggtatggtggcaggccccgtggccgggggactgttgggcgccatctccttgcatgcaccattccttgcggcggcggtgctcaacggcctcaacctactactgggctgcttcctaatgcaggagtcgcataagggagagcgtcgaatggtgcactctcagtacaatctgctctgatgccgcatagttaagccagccccgacacccgccaacacccgctgacgcgccctgacgggcttgtctgctcccggcatccgcttacagacaagctgtgaccgtctccgggagctgcatgtgtcagaggttttcaccgtcatcaccgaaacgcgcgagacgaaagggcctcgtgatacgcctatttttataggttaatgtcatgataataatggtttcttagacgtcaggtggcacttttcggggaaatgtgcgcggaacccctatttgtttatttttctaaatacattcaaatatgtatccgctcatgagacaataaccctgataaatgcttcaataatattgaaaaaggaagagtatgagtattcaacatttccgtgtcgcccttattcccttttttgcggcattttgccttcctgtttttgctcacccagaaacgctggtgaaagtaaaagatgctgaagatcagttgggtgcacgagtgggttacatcgaactggatctcaacagcggtaagatccttgagagttttcgccccgaagaacgttttccaatgatgagcacttttaaagttctgctatgtggcgcggtattatcccgtattgacgccgggcaagagcaactcggtcgccgcatacactattctcagaatgacttggttgagtactcaccagtcacagaaaagcatcttacggatggcatgacagtaagagaattatgcagtgctgccataaccatgagtgataacactgcggccaacttacttctgacaacgatcggaggaccgaaggagctaaccgcttttttgcacaacatgggggatcatgtaactcgccttgatcgttgggaaccggagctgaatgaagccataccaaacgacgagcgtgacaccacgatgcctgtagcaatggcaacaacgttgcgcaaactattaactggcgaactacttactctagcttcccggcaacaattaatagactggatggaggcggataaagttgcaggaccacttctgcgctcggcccttccggctggctggtttattgctgataaatctggagccggtgagcgtgggtctcgcggtatcattgcagcactggggccagatggtaagccctcccgtatcgtagttatctacacgacggggagtcaggcaactatggatgaacgaaatagacagatcgctgagataggtgcctcactgattaagcattggtaactgtcagaccaagtttactcatatatactttagattgatttaaaacttcatttttaatttaaaaggatctaggtgaagatcctttttgataatctcatgaccaaaatcccttaacgtgagttttcgttccactgagcgtcagaccccgtagaaaagatcaaaggatcttcttgagatcctttttttctgcgcgtaatctgctgcttgcaaacaaaaaaaccaccgctaccagcggtggtttgtttgccggatcaagagctaccaactctttttccgaaggtaactggcttcagcagagcgcagataccaaatactgtctttctagtgtagccgtagttaggccaccacttcaagaactctgtagcaccgcctacatacctcgctctgctaatcctgttaccagtggctgctgccagtggcgataagtcgtgtcttaccgggttggactcaagacgatagttaccggataaggcgcagcggtcgggctgaacggggggttcgtgcacacagcccagcttggagcgaacgacctacaccgaactgagatacctacagcgtgagctatgagaaagcgccacgcttcccgaagggagaaaggcggacaggtatccggtaagcggcagggtcggaacaggagagcgcacgagggagcttccagggggaaacgcctggtatctttatagtcctgtcgggtttcgccacctctgacttgagcgtcgatttttgtgatgctcgtcaggggggcggagcctatggaaaaacgccagcaacgcggcctttttacggttcctggccttttgctggccttttgctcacatgttctttcctgcgttatcccctgattctgtggataaccgtattaccgcctttgagtgagctgataccgctcgccgcagccgaacgaccgagcgcagcgagtcagtgagcgaggaagcggaagagcgcccaatacgcaaaccgcctctccccgcgcgttggccgattcattaatgcagctgtggaatgtgtgtcagttagggtgtggaaagtccccaggctccccagcaggcagaagtatgcaaagcatgcatctcaattagtcagcaaccaggtgtggaaagtccccaggctccccagcaggcagaagtatgcaaagcatgcatctcaattagtcagcaaccatagtcccgcccctaactccgcccatcccgcccctaactccgcccagttccgcccattctccgccccatggctgactaattttttttatttatgcagaggccgaggccgcctcggcctctgagctattccagaagtagtgaggaggcttttttggaggcctaggcttttgcaaaaagcttggacacaagacaggcttgcgagatatgtttgagaataccactttatcccgcgtcagggagaggcagtgcgtaaaaagacgcggactcatgtgaaatactggtttttagtgcgccagatctctataatctcgcgcaacctattttcccctcgaacactttttaagccgtagataaacaggctgggacacttcacatgagcgaaaaatacatcgtcacctgggacatgttgcagatccatgcacgtaaactcgcaagccgactgatgccttctgaacaatggaaaggcattattgccgtaagccgtggcggtctgtaccgggtgcgttactggcgcgtgaactgggtattcgtcatgtcgataccgtttgtatttccagctacgatcacgacaaccagcgcgagcttaaagtgctgaaacgcgcagaaggcgatggcgaaggcttcatcgttattgatgacctggtggataccggtggtactgcggttgcgattcgtgaaatgtatccaaaagcgcactttgtcaccatcttcgcaaaaccggctggtcgtccgctggttgatgactatgttgttgatatcccgcaagatacctggattgaacagccgtgggatatgggcgtcgtattcgtcccgccaatctccggtcgctaatcttttcaacgcctggcactgccgggcgttgttctttttaacttcaggcgggttacaatagtttccagtaagtattctggaggctgcatccatgacacaggcaaacctgagcgaaaccctgttcaaaccccgctttaaacatcctgaaacctcgacgctagtccgccgctttaatcacggcgcacaaccgcctgtgcagtcggcccttgatggtaaaaccatccctcactggtatcgcatgattaaccgtctgatgtggatctggcgcggcattgacccacgcgaaatcctcgacgtccaggcacgtattgtgatgagcgatgccgaacgtaccgacgatgatttatacgatacggtgattggctaccgtggcggcaactggatttatgagtgggccccggatctttgtgaaggaaccttacttctgtggtgtgacataattggacaaactacctacagagatttaaagctctaaggtaaatataaaatttttaagtgtataatgtgttaaactactgattctaattgtttgtgtattttagattccaacctatggaactgatgaatgggagcagtggtggaatgcctttaatgaggaaaacctgttttgctcagaagaaatgccatctagtgatgatgaggctactgctgactctcaacattctactcctccaaaaaagaagagaaaggtagaagaccccaaggactttccttcagaattgctaagttttttgagtcatgctgtgtttagtaatagaactcttgcttgctttgctatttacaccacaaaggaaaaagctgcactgctatacaagaaaattatggaaaaatattctgtaacctttataagtaggcataacagttataatcataacatactgttttttcttactccacacaggcatagagtgtctgctattaataactatgctcaaaaattgtgtacctttagctttttaatttgtaaaggggttaataaggaatatttgatgtatagtgccttgactagagatcataatcagccataccacatttgtagaggttttacttgctttaaaaaacctcccacacctccccctgaacctgaaacataaaatgaatgcaattgttgttgttaacttgtttattgcagcttataatggttacaaataaagcaatagcatcacaaatttcacaaataaagcatttttttcactgcattctagttgtggtttgtccaaactcatcaatgtatcttatcatgtctggatcaactggataactcaagctaaccaaaatcatcccaaacttcccaccccataccctattaccactgccaattacctagtggtttcatttactctaaacctgtgattcctctgaattattttcattttaaagaaattgtatttgttaaatatgtactacaaacttagtagttggaagggctaattcactcccaaagaagacaagatatccttgatctgtggatctaccacacacaaggctacttccctgattagcagaactacacaccagggccaggggtcagatatccactgacctttggatggtgctacaagctagtaccagttgagccagataaggtagaagaggccaataaaggagagaacaccagcttgttacaccctgtgagcctgcatgggatggatgacccggagagagaagtgttagagtggaggtttgacagccgcctagcatttcatcacgtggcccgagagctgcatccggagtacttcaagaactgctgatatcgagcttgctacaagggactttccgctggggactttccagggaggcgtggcctgggcgggactggggagtggcgagccctcagatcctgcatataagcagctgctttttgcctgtactgggtctctctggttagaccagatctgagcctgggagctctctggctaactagggaacccactgcttaagcctcaataaagcttgccttgagtgcttcaagtagtgtgtgcccgtctgttgtgtgactctggtaactagagatccctcagacccttttagtcagtgtggaaaatctctagcagtggcgcccgaacagggacttgaaagcgaaagggaaaccagaggagctctctcgacgcaggactcggcttgctgaagcgcgcacggcaagaggcgaggggcggcgactggtgagtacgccaaaaattttgactagcggaggctagaaggagagagatgggtgcgagagcgtcagtattaagcgggggagaattagatcgcgatgggaaaaaattcggttaaggccagggggaaagaaaaaatataaattaaaacatatagtatgggcaagcagggagctagaacgattcgcagttaatcctggcctgttagaaacatcagaaggctgtagacaaatactgggacagctacaaccatcccttcagacaggatcagaagaacttagatcattatataatacagtagcaaccctctattgtgtgcatcaaaggatagagataaaagacaccaaggaagctttagacaagatagaggaagagcaaaacaaaagtaagaccaccgcacagcaagcggccggccgctgatcttcagacctggaggaggagatatgagggacaattggagaagtgaattatataaatataaagtagtaaaaattgaaccattaggagtagcacccaccaaggcaaagagaagagtggtgcagagagaaaaaagagcagtgggaataggagctttgttccttgggttcttgggagcagcaggaagcactatgggcgcagcgtcaatgacgctgacggtacaggccagacaattattgtctggtatagtgcagcagcagaacaatttgctgagggctattgaggcgcaacagcatctgttgcaactcacagtctggggcatcaagcagctccaggcaagaatcctggctgtgaaagatacctaaaggatcaacagctcctggggatttggggttgctctggaaaactcatttgcaccactgctgtgccttggaatgctagttggagtaataaatctctggaacagatttggaatcacacgacctggatggagtgggacagagaaattaacaattacacaagcttaatacactccttaattgaagaatcgcaaaaccagcaagaaaagaatgaacaagaattattggaattagataaatgggcaagtttgtggaattggtttaacataacaaattggctgtggtatataaaattattcataatgatagtaggaggcttggtaggtttaagaatagtttttgctgtactttctatagtgaatagagttaggcagggatattcaccattatcgtttcagacccacctcccaaccccgaggggacccgacaggcccgaaggaatagaagaagaaggtggagagagagacagagacagatccattcgattagtgaacggatctcgacggtatcgccaaatggcagtattcatccacaattttaaaagaaaaggggggattggggggtacagtgcaggggaaagaatagtagacataatagcaacagacatacaaactaaagaattacaaaaacaaattacaaaaattcaaaattttcgggtttattacagggacagcagagatccagtttggatcgataagcttgatatcgaattcctgcagccccgataaaataaaagattttatttagtctccagaaaaaggggggaatgaaagaccccacctgtaggtttggcaagctagctgcagtaacgccattttgcaaggcatggaaaaataccaaaccaagaatagagaagttcagatcaagggcgggtacatgaaaatagctaacgttgggccaaacaggatatctgcggtgagcagtttcggccccggcccggggccaagaacagatggtcaccgcagtttcggccccggcccgaggccaagaacagatggtccccagatatggcccaaccctcagcagtttcttaagacccatcagatgtttccaggctcccccaaggacctgaaatgaccctgcgccttatttgaattaaccaatcagcctgcttctcgcttctgttcgcgcgcttctgcttcccgagctctataaaagagctcacaacccctcactcggcgcgccagtcctccgacagactgagtcgcccgggggggatctggagctctcgagaattctcacgcgtgccgccaccatggccttaccagtgaccgccttgctcctgccgctggccttgctgctccacgccgccaggccgaaatacctattgcctacggcagccgctggattgttattactcgcggcccagccggccatggcccaggtgcagctggtgcagtctggggcagaggtgaaaaagcccggggagtctctgaagatctcctgtaagggttctggatacagctttaccagctactggatcgcctgggtgcgccagatgcccgggaaaggcctggagtacatggggctcatctatcctggtgactctgacaccaaatacagcccgtccttccaaggccaggtcaccatctcagtcgacaagtccgtcagcactgcctacttgcaatggagcagtctgaagccctcggacagcgccgtgtatttttgtgcgagacatgacgtgggatattgcaccgaccggacttgcgcaaagtggcctgaatacttccagcattggggccagggcaccctggtcaccgtctcctcaggtggaggcggttcaggcggaggtggctctggcggtggcggatcgcagtctgtgttgacgcagccgccctcagtgtctgcggccccaggacagaaggtcaccatctcctgctctggaagcagctccaacattgggaataattatgtatcctggtaccagcagctcccaggaacagcccccaaactcctcatctatgatcacaccaatcggcccgcaggggtccctgaccgattctctggctccaagtctggcacctcagcctccctggccatcagtgggttccggtccgaggatgaggctgattattactgtgcctcctgggactacaccctctcgggctgggtgttcggcggagggaccaagctgaccgtcctaggtgggaagcctatcccgaaccctctgttgggtctcgatagtaccaatggggccgcaaccacgacgccagcgccgcgaccaccaacaccggcgcccaccatcgcgttgcagcccctgtccctgcgcccagaggcgtgccggccagcggcggggggcgcagtgcacacgagggggctggacttcgcctgtgatttttgggtgctggtggtggttggtggagtcctggcttgctatagcttgctagtaacagtggcctttattattttctgggtggaggacgtggtgtgctgccactcaatctacggcaagaagaagggtgatatcgacacctaccgatacataggctcttccgggacaggctgcgtggtcatagtgggcaggatcgtcttgtccggatccggcactagtgcgcccatcacggcgtacgcccagcagacgagaggcctcctagggtgtataatcaccagcctgactggccgggacaaaaaccaagtggagggtgaggtccagatcgtgtcaactgctacccaaaccttcctggcaacgtgcatcaatggggtatgctgggcagtctaccacggggccggaacgaggaccatcgcatcacccaagggtcctgtcatccagatgtataccaatgtggaccaagaccttgtgggctggcccgctcctcaaggttcccgctcattgacaccctgtacctgcggctcctcggacctttacctggtcacgaggcacgccgatgtcattcccgtgcgccggcgaggtgatagcaggggtagcctgctttcgccccggcccatttcctacttgaaaggctcctcggggggtccgctgttgtgccccgcgggacacgccgtgggcctattcagggccgcggtgtgcacccgtggagtggctaaagcggtggactttatccctgtggagaacctagagacaaccatgagatccccggtgttcacggacaactcctctccaccagcagtcaccctgacgcacccaatcaccaaaatcgatagggaggttctctaccaggagttcgatgagatggaagagtgctctcagcactatccctacgatgtgcccgattacgctaggagtaagaggagcaggctcctgcacagtgactacatgaacatgactccccgccgccccgggcccacccgcaagcattaccagccctatgccccaccacgcgacttcgcagcctatcgctccaaacggggcagaaagaaactcctgtatatattcaaacaaccatttatgagaccagtacaaactactcaagaggaagatggctgtagctgccgatttccagaagaagaagaaggaggatgtgaactgagagtgaagttcagcaggagcgcagacgcccccgcgtacaagcagggccagaaccagctctataacgagctcaatctaggacgaagagaggagtacgatgttttggacaagagacgtggccgggaccctgagatggggggaaagccgagaaggaagaaccctcaggaaggcctgtacaatgaactgcagaaagataagatggcggaggcctacagtgagattgggatgaaaggcgagcgccggaggggcaaggggcacgatggcctttaccagggtctcagtacagccaccaaggacacctacgacgcccttcacatgcaggccctgccccctcgctaaactagtgcggccgcgactctagagtcgacctgcaggcatgcaagcttgatatcaagcttatcgataatcaacctctggattacaaaatttgtgaaagattgactggtattcttaactatgttgctccttttacgctatgtggatacgctgctttaatgcctttgtatcatgctattgcttcccgtatggctttcattttctcctccttgtataaatcctggttgctgtctctttatgaggagttgtggcccgttgtcaggcaacgtggcgtggtgtgcactgtgtttgctgacgcaacccccactggttggggcattgccaccacctgtcagctcctttccgggactttcgctttccccctccctattgccacggcggaactcatcgccgcctgccttgcccgctgctggacaggggctcggctgttgggcactgacaattccgtggtgttgtcggggaaatcatcgtcctttccttggctgctcgcctgtgttgccacctggattctgcgcgggacgtccttctgctacgtcccttcggccctcaatccagcggaccttccttcccgcggcctgctgccggctctgcggcctcttccgcgtcttcgccttcgccctcagacgagtcggatctccctttgggccgcctccccgcat

SEQ ID NO: 251 - DNA, 10720 bp, Artificial Sequence
  synthetic vector
cgataccgtcgacctcgagggaattaattcgagctcggtacctttaagaccaatgacttacaaggcagctgtagatcttagccactttttaaaagaaaaggggggactggaagggctaattcactcccaacgaagacaagatctgctttttgcttgtactgggtctctctggttagaccagatctgagcctgggagctctctggctaactagggaacccactgcttaagcctcaataaagcttgccttgagtgcttcaagtagtgtgtgcccgtctgttgtgtgactctggtaactagagatccctcagacccttttagtcagtgtggaaaatctctagcagcatctagaattaattccgtgtattctatagtgtcacctaaatcgtatgtgtatgatacataaggttatgtattaattgtagccgcgttctaacgacaatatgtacaagcctaattgtgtagcatctggcttactgaagcagaccctatcatctctctcgtaaactgccgtcagagtcggtttggttggacgaaccttctgagtttctggtaacgccgtcccgcacccggaaatggtcagcgaaccaatcagcagggtcatcgctagccagatcctctacgccggacgcatcgtggccggcatcaccggcgccacaggtgcggttgctggcgcctatatcgccgacatcaccgatggggaagatcgggctcgccacttcgggctcatgagcgcttgtttcggcgtgggtatggtggcaggccccgtggccgggggactgttgggcgccatctccttgcatgcaccattccttgcggcggcggtgctcaacggcctcaacctactactgggctgcttcctaatgcaggagtcgcataagggagagcgtcgaatggtgcactctcagtacaatctgctctgatgccgcatagttaagccagccccgacacccgccaacacccgctgacgcgccctgacgggcttgtctgctcccggcatccgcttacagacaagctgtgaccgtctccgggagctgcatgtgtcagaggttttcaccgtcatcaccgaaacgcgcgagacgaaagggcctcgtgatacgcctatttttataggttaatgtcatgataataatggtttcttagacgtcaggtggcacttttcggggaaatgtgcgcggaacccctatttgtttatttttctaaatacattcaaatatgtatccgctcatgagacaataaccctgataaatgcttcaataatattgaaaaaggaagagtatgagtattcaacatttccgtgtcgcccttattcccttttttgcggcattttgccttcctgtttttgctcacccagaaacgctggtgaaagtaaaagatgctgaagatcagttgggtgcacgagtgggttacatcgaactggatctcaacagcggtaagatccttgagagttttcgccccgaagaacgttttccaatgatgagcacttttaaagttctgctatgtggcgcggtattatcccgtattgacgccgggcaagagcaactcggtcgccgcatacactattctcagaatgacttggttgagtactcaccagtcacagaaaagcatcttacggatggcatgacagtaagagaattatgcagtgctgccataaccatgagtgataacactgcggccaacttacttctgacaacgatcggaggaccgaaggagctaaccgcttttttgcacaacatgggggatcatgtaactcgccttgatcgttgggaaccggagctgaatgaagccataccaaacgacgagcgtgacaccacgatgcctgtagcaatggcaacaacgttgcgcaaactattaactggcgaactacttactctagcttcccggcaacaattaatagactggatggaggcggataaagttgcaggaccacttctgcgctcggcccttccggctggctggtttattgctgataaatctggagccggtgagcgtgggtctcgcggtatcattgcagcactggggccagatggtaagccctcccgtatcgtagttatctacacgacggggagtcaggcaactatggatgaacgaaatagacagatcgctgagataggtgcctcactgattaagcattggtaactgtcagaccaagtttactcatatatactttagattgatttaaaacttcatttttaatttaaaaggatctaggtgaagatcctttttgataatctcatgaccaaaatcccttaacgtgagttttcgttccactgagcgtcagaccccgtagaaaagatcaaaggatcttcttgagatcctttttttctgcgcgtaatctgctgcttgcaaacaaaaaaaccaccgctaccagcggtggtttgtttgccggatcaagagctaccaactctttttccgaaggtaactggcttcagcagagcgcagataccaaatactgtctttctagtgtagccgtagttaggccaccacttcaagaactctgtagcaccgcctacatacctcgctctgctaatcctgttaccagtggctgctgccagtggcgataagtcgtgtcttaccgggttggactcaagacgatagttaccggataaggcgcagcggtcgggctgaacggggggttcgtgcacacagcccagcttggagcgaacgacctacaccgaactgagatacctacagcgtgagctatgagaaagcgccacgcttcccgaagggagaaaggcggacaggtatccggtaagcggcagggtcggaacaggagagcgcacgagggagcttccagggggaaacgcctggtatctttatagtcctgtcgggtttcgccacctctgacttgagcgtcgatttttgtgatgctcgtcaggggggcggagcctatggaaaaacgccagcaacgcggcctttttacggttcctggccttttgctggccttttgctcacatgttctttcctgcgttatcccctgattctgtggataaccgtattaccgcctttgagtgagctgataccgctcgccgcagccgaacgaccgagcgcagcgagtcagtgagcgaggaagcggaagagcgcccaatacgcaaaccgcctctccccgcgcgttggccgattcattaatgcagctgtggaatgtgtgtcagttagggtgtggaaagtccccaggctccccagcaggcagaagtatgcaaagcatgcatctcaattagtcagcaaccaggtgtggaaagtccccaggctccccagcaggcagaagtatgcaaagcatgcatctcaattagtcagcaaccatagtcccgcccctaactccgcccatcccgcccctaactccgcccagttccgcccattctccgccccatggctgactaattttttttatttatgcagaggccgaggccgcctcggcctctgagctattccagaagtagtgaggaggcttttttggaggcctaggcttttgcaaaaagcttggacacaagacaggcttgcgagatatgtttgagaataccactttatcccgcgtcagggagaggcagtgcgtaaaaagacgcggactcatgtgaaatactggtttttagtgcgccagatctctataatctcgcgcaacctattttcccctcgaacactttttaagccgtagataaacaggctgggacacttcacatgagcgaaaaatacatcgtcacctgggacatgttgcagatccatgcacgtaaactcgcaagccgactgatgccttctgaacaatggaaaggcattattgccgtaagccgtggcggtctgtaccgggtgcgttactggcgcgtgaactgggtattcgtcatgtcgataccgtttgtatttccagctacgatcacgacaaccagcgcgagcttaaagtgctgaaacgcgcagaaggcgatggcgaaggcttcatcgttattgatgacctggtggataccggtggtactgcggttgcgattcgtgaaatgtatccaaaagcgcactttgtcaccatcttcgcaaaaccggctggtcgtccgctggttgatgactatgttgttgatatcccgcaagatacctggattgaacagccgtgggatatgggcgtcgtattcgtcccgccaatctccggtcgctaatcttttcaacgcctggcactgccgggcgttgttctttttaacttcaggcgggttacaatagtttccagtaagtattctggaggctgcatccatgacacaggcaaacctgagcgaaaccctgttcaaaccccgctttaaacatcctgaaacctcgacgctagtccgccgctttaatcacggcgcacaaccgcctgtgcagtcggcccttgatggtaaaaccatccctcactggtatcgcatgattaaccgtctgatgtggatctggcgcggcattgacccacgcgaaatcctcgacgtccaggcacgtattgtgatgagcgatgccgaacgtaccgacgatgatttatacgatacggtgattggctaccgtggcggcaactggatttatgagtgggccccggatctttgtgaaggaaccttacttctgtggtgtgacataattggacaaactacctacagagatttaaagctctaaggtaaatataaaatttttaagtgtataatgtgttaaactactgattctaattgtttgtgtattttagattccaacctatggaactgatgaatgggagcagtggtggaatgcctttaatgaggaaaacctgttttgctcagaagaaatgccatctagtgatgatgaggctactgctgactctcaacattctactcctccaaaaaagaagagaaaggtagaagaccccaaggactttccttcagaattgctaagttttttgagtcatgctgtgtttagtaatagaactcttgcttgctttgctatttacaccacaaaggaaaaagctgcactgctatacaagaaaattatggaaaaatattctgtaacctttataagtaggcataacagttataatcataacatactgttttttcttactccacacaggcatagagtgtctgctattaataactatgctcaaaaattgtgtacctttagctttttaatttgtaaaggggttaataaggaatatttgatgtatagtgccttgactagagatcataatcagccataccacatttgtagaggttttacttgctttaaaaaacctcccacacctccccctgaacctgaaacataaaatgaatgcaattgttgttgttaacttgtttattgcagcttataatggttacaaataaagcaatagcatcacaaatttcacaaataaagcatttttttcactgcattctagttgtggtttgtccaaactcatcaatgtatcttatcatgtctggatcaactggataactcaagctaaccaaaatcatcccaaacttcccaccccataccctattaccactgccaattacctagtggtttcatttactctaaacctgtgattcctctgaattattttcattttaaagaaattgtatttgttaaatatgtactacaaacttagtagttggaagggctaattcactcccaaagaagacaagatatccttgatctgtggatctaccacacacaaggctacttccctgattagcagaactacacaccagggccaggggtcagatatccactgacctttggatggtgctacaagctagtaccagttgagccagataaggtagaagaggccaataaaggagagaacaccagcttgttacaccctgtgagcctgcatgggatggatgacccggagagagaagtgttagagtggaggtttgacagccgcctagcatttcatcacgtggcccgagagctgcatccggagtacttcaagaactgctgatatcgagcttgctacaagggactttccgctggggactttccagggaggcgtggcctgggcgggactggggagtggcgagccctcagatcctgcatataagcagctgctttttgcctgtactgggtctctctggttagaccagatctgagcctgggagctctctggctaactagggaacccactgcttaagcctcaataaagcttgccttgagtgcttcaagtagtgtgtgcccgtctgttgtgtgactctggtaactagagatccctcagacccttttagtcagtgtggaaaatctctagcagtggcgcccgaacagggacttgaaagcgaaagggaaaccagaggagctctctcgacgcaggactcggcttgctgaagcgcgcacggcaagaggcgaggggcggcgactggtgagtacgccaaaaattttgactagcggaggctagaaggagagagatgggtgcgagagcgtcagtattaagcgggggagaattagatcgcgatgggaaaaaattcggttaaggccagggggaaagaaaaaatataaattaaaacatatagtatgggcaagcagggagctagaacgattcgcagttaatcctggcctgttagaaacatcagaaggctgtagacaaatactgggacagctacaaccatcccttcagacaggatcagaagaacttagatcattatataatacagtagcaaccctctattgtgtgcatcaaaggatagagataaaagacaccaaggaagctttagacaagatagaggaagagcaaaacaaaagtaagaccaccgcacagcaagcggccggccgctgatcttcagacctggaggaggagatatgagggacaattggagaagtgaattatataaatataaagtagtaaaaattgaaccattaggagtagcacccaccaaggcaaagagaagagtggtgcagagagaaaaaagagcagtgggaataggagctttgttccttgggttcttgggagcagcaggaagcactatgggcgcagcgtcaatgacgctgacggtacaggccagacaattattgtctggtatagtgcagcagcagaacaatttgctgagggctattgaggcgcaacagcatctgttgcaactcacagtctggggcatcaagcagctccaggcaagaatcctggctgtgaaagatacctaaaggatcaacagctcctggggatttggggttgctctggaaaactcatttgcaccactgctgtgccttggaatgctagttggagtaataaatctctggaacagatttggaatcacacgacctggatggagtgggacagagaaattaacaattacacaagcttaatacactccttaattgaagaatcgcaaaaccagcaagaaaagaatgaacaagaattattggaattagataaatgggcaagtttgtggaattggtttaacataacaaattggctgtggtatataaaattattcataatgatagtaggaggcttggtaggtttaagaatagtttttgctgtactttctatagtgaatagagttaggcagggatattcaccattatcgtttcagacccacctcccaaccccgaggggacccgacaggcccgaaggaatagaagaagaaggtggagagagagacagagacagatccattcgattagtgaacggatctcgacggtatcgccaaatggcagtattcatccacaattttaaaagaaaaggggggattggggggtacagtgcaggggaaagaatagtagacataatagcaacagacatacaaactaaagaattacaaaaacaaattacaaaaattcaaaattttcgggtttattacagggacagcagagatccagtttggatcgataagcttgatatcgaattcctgcagccccgataaaataaaagattttatttagtctccagaaaaaggggggaatgaaagaccccacctgtaggtttggcaagctagctgcagtaacgccattttgcaaggcatggaaaaataccaaaccaagaatagagaagttcagatcaagggcgggtacatgaaaatagctaacgttgggccaaacaggatatctgcggtgagcagtttcggccccggcccggggccaagaacagatggtcaccgcagtttcggccccggcccgaggccaagaacagatggtccccagatatggcccaaccctcagcagtttcttaagacccatcagatgtttccaggctcccccaaggacctgaaatgaccctgcgccttatttgaattaaccaatcagcctgcttctcgcttctgttcgcgcgcttctgcttcccgagctctataaaagagctcacaacccctcactcggcgcgccagtcctccgacagactgagtcgcccgggggggatctggagctctcgagaattctcacgcgtgccgccaccatggccttaccagtgaccgccttgctcctgccgctggccttgctgctccacgccgccaggccgaaatacctattgcctacggcagccgctggattgttattactcgcggcccagccggccatggcccaggtgcagctggtgcagtctggggcagaggtgaaaaagcccggggagtctctgaagatctcctgtaagggttctggatacagctttaccagctactggatcgcctgggtgcgccagatgcccgggaaaggcctggagtacatggggctcatctatcctggtgactctgacaccaaatacagcccgtccttccaaggccaggtcaccatctcagtcgacaagtccgtcagcactgcctacttgcaatggagcagtctgaagccctcggacagcgccgtgtatttttgtgcgagacatgacgtgggatattgcaccgaccggacttgcgcaaagtggcctgaatacttccagcattggggccagggcaccctggtcaccgtctcctcaggtggaggcggttcaggcggaggtggctctggcggtggcggatcgcagtctgtgttgacgcagccgccctcagtgtctgcggccccaggacagaaggtcaccatctcctgctctggaagcagctccaacattgggaataattatgtatcctggtaccagcagctcccaggaacagcccccaaactcctcatctatgatcacaccaatcggcccgcaggggtccctgaccgattctctggctccaagtctggcacctcagcctccctggccatcagtgggttccggtccgaggatgaggctgattattactgtgcctcctgggactacaccctctcgggctgggtgttcggcggagggaccaagctgaccgtcctaggtgggaagcctatcccgaaccctctgttgggtctcgatagtaccaatggggccgcaaccacgacgccagcgccgcgaccaccaacaccggcgcccaccatcgcgttgcagcccctgtccctgcgcccagaggcgtgccggccagcggcggggggcgcagtgcacacgagggggctggacttcgcctgtgatttttgggtgctggtggtggttggtggagtcctggcttgctatagcttgctagtaacagtggcctttattattttctgggtgaggagtaagaggagcaggctcctgcacagtgactacatgaacatgactccccgccgccccgggcccacccgcaagcattaccagccctatgccccaccacgcgacttcgcagcctatcgctccaaacggggcagaaagaaactcctgtatatattcaaacaaccatttatgagaccagtacaaactactcaagaggaagatggctgtagctgccgatttccagaagaagaagaaggaggatgtgaactgagagtgaagttcagcaggagcgcagacgcccccgcgtacaagcagggccagaaccagctctataacgagctcaatctaggacgaagagaggagtacgatgttttggacaagagacgtggccgggaccctgagatggggggaaagccgagaaggaagaaccctcaggaaggcctgtacaatgaactgcagaaagataagatggcggaggcctacagtgagattgggatgaaaggcgagcgccggaggggcaaggggcacgatggcctttaccagggtctcagtacagccaccaaggacacctacgacgcccttcacatgcaggccctgccccctcgctaaactagtgcggccgcgactctagagtcgacctgcaggcatgcaagcttgatatcaagcttatcgataatcaacctctggattacaaaatttgtgaaagattgactggtattcttaactatgttgctccttttacgctatgtggatacgctgctttaatgcctttgtatcatgctattgcttcccgtatggctttcattttctcctccttgtataaatcctggttgctgtctctttatgaggagttgtggcccgttgtcaggcaacgtggcgtggtgtgcactgtgtttgctgacgcaacccccactggttggggcattgccaccacctgtcagctcctttccgggactttcgctttccccctccctattgccacggcggaactcatcgccgcctgccttgcccgctgctggacaggggctcggctgttgggcactgacaattccgtggtgttgtcggggaaatcatcgtcctttccttggctgctcgcctgtgttgccacctggattctgcgcgggacgtccttctgctacgtcccttcggccctcaatccagcggaccttccttcccgcggcctgctgccggctctgcggcctcttccgcgtcttcgccttcgccctcagacgagtcggatctccctttgggccgcctccccgcat

SEQ ID NO: 252 - DNA, 11542 bp, Artificial Sequence
  synthetic vector
cgataccgtcgacctcgagggaattaattcgagctcggtacctttaagaccaatgacttacaaggcagctgtagatcttagccactttttaaaagaaaaggggggactggaagggctaattcactcccaacgaagacaagatctgctttttgcttgtactgggtctctctggttagaccagatctgagcctgggagctctctggctaactagggaacccactgcttaagcctcaataaagcttgccttgagtgcttcaagtagtgtgtgcccgtctgttgtgtgactctggtaactagagatccctcagacccttttagtcagtgtggaaaatctctagcagcatctagaattaattccgtgtattctatagtgtcacctaaatcgtatgtgtatgatacataaggttatgtattaattgtagccgcgttctaacgacaatatgtacaagcctaattgtgtagcatctggcttactgaagcagaccctatcatctctctcgtaaactgccgtcagagtcggtttggttggacgaaccttctgagtttctggtaacgccgtcccgcacccggaaatggtcagcgaaccaatcagcagggtcatcgctagccagatcctctacgccggacgcatcgtggccggcatcaccggcgccacaggtgcggttgctggcgcctatatcgccgacatcaccgatggggaagatcgggctcgccacttcgggctcatgagcgcttgtttcggcgtgggtatggtggcaggccccgtggccgggggactgttgggcgccatctccttgcatgcaccattccttgcggcggcggtgctcaacggcctcaacctactactgggctgcttcctaatgcaggagtcgcataagggagagcgtcgaatggtgcactctcagtacaatctgctctgatgccgcatagttaagccagccccgacacccgccaacacccgctgacgcgccctgacgggcttgtctgctcccggcatccgcttacagacaagctgtgaccgtctccgggagctgcatgtgtcagaggttttcaccgtcatcaccgaaacgcgcgagacgaaagggcctcgtgatacgcctatttttataggttaatgtcatgataataatggtttcttagacgtcaggtggcacttttcggggaaatgtgcgcggaacccctatttgtttatttttctaaatacattcaaatatgtatccgctcatgagacaataaccctgataaatgcttcaataatattgaaaaaggaagagtatgagtattcaacatttccgtgtcgcccttattcccttttttgcggcattttgccttcctgtttttgctcacccagaaacgctggtgaaagtaaaagatgctgaagatcagttgggtgcacgagtgggttacatcgaactggatctcaacagcggtaagatccttgagagttttcgccccgaagaacgttttccaatgatgagcacttttaaagttctgctatgtggcgcggtattatcccgtattgacgccgggcaagagcaactcggtcgccgcatacactattctcagaatgacttggttgagtactcaccagtcacagaaaagcatcttacggatggcatgacagtaagagaattatgcagtgctgccataaccatgagtgataacactgcggccaacttacttctgacaacgatcggaggaccgaaggagctaaccgcttttttgcacaacatgggggatcatgtaactcgccttgatcgttgggaaccggagctgaatgaagccataccaaacgacgagcgtgacaccacgatgcctgtagcaatggcaacaacgttgcgcaaactattaactggcgaactacttactctagcttcccggcaacaattaatagactggatggaggcggataaagttgcaggaccacttctgcgctcggcccttccggctggctggtttattgctgataaatctggagccggtgagcgtgggtctcgcggtatcattgcagcactggggccagatggtaagccctcccgtatcgtagttatctacacgacggggagtcaggcaactatggatgaacgaaatagacagatcgctgagataggtgcctcactgattaagcattggtaactgtcagaccaagtttactcatatatactttagattgatttaaaacttcatttttaatttaaaaggatctaggtgaagatcctttttgataatctcatgaccaaaatcccttaacgtgagttttcgttccactgagcgtcagaccccgtagaaaagatcaaaggatcttcttgagatcctttttttctgcgcgtaatctgctgcttgcaaacaaaaaaaccaccgctaccagcggtggtttgtttgccggatcaagagctaccaactctttttccgaaggtaactggcttcagcagagcgcagataccaaatactgtctttctagtgtagccgtagttaggccaccacttcaagaactctgtagcaccgcctacatacctcgctctgctaatcctgttaccagtggctgctgccagtggcgataagtcgtgtcttaccgggttggactcaagacgatagttaccggataaggcgcagcggtcgggctgaacggggggttcgtgcacacagcccagcttggagcgaacgacctacaccgaactgagatacctacagcgtgagctatgagaaagcgccacgcttcccgaagggagaaaggcggacaggtatccggtaagcggcagggtcggaacaggagagcgcacgagggagcttccagggggaaacgcctggtatctttatagtcctgtcgggtttcgccacctctgacttgagcgtcgatttttgtgatgctcgtcaggggggcggagcctatggaaaaacgccagcaacgcggcctttttacggttcctggccttttgctggccttttgctcacatgttctttcctgcgttatcccctgattctgtggataaccgtattaccgcctttgagtgagctgataccgctcgccgcagccgaacgaccgagcgcagcgagtcagtgagcgaggaagcggaagagcgcccaatacgcaaaccgcctctccccgcgcgttggccgattcattaatgcagctgtggaatgtgtgtcagttagggtgtggaaagtccccaggctccccagcaggcagaagtatgcaaagcatgcatctcaattagtcagcaaccaggtgtggaaagtccccaggctccccagcaggcagaagtatgcaaagcatgcatctcaattagtcagcaaccatagtcccgcccctaactccgcccatcccgcccctaactccgcccagttccgcccattctccgccccatggctgactaattttttttatttatgcagaggccgaggccgcctcggcctctgagctattccagaagtagtgaggaggcttttttggaggcctaggcttttgcaaaaagcttggacacaagacaggcttgcgagatatgtttgagaataccactttatcccgcgtcagggagaggcagtgcgtaaaaagacgcggactcatgtgaaatactggtttttagtgcgccagatctctataatctcgcgcaacctattttcccctcgaacactttttaagccgtagataaacaggctgggacacttcacatgagcgaaaaatacatcgtcacctgggacatgttgcagatccatgcacgtaaactcgcaagccgactgatgccttctgaacaatggaaaggcattattgccgtaagccgtggcggtctgtaccgggtgcgttactggcgcgtgaactgggtattcgtcatgtcgataccgtttgtatttccagctacgatcacgacaaccagcgcgagcttaaagtgctgaaacgcgcagaaggcgatggcgaaggcttcatcgttattgatgacctggtggataccggtggtactgcggttgcgattcgtgaaatgtatccaaaagcgcactttgtcaccatcttcgcaaaaccggctggtcgtccgctggttgatgactatgttgttgatatcccgcaagatacctggattgaacagccgtgggatatgggcgtcgtattcgtcccgccaatctccggtcgctaatcttttcaacgcctggcactgccgggcgttgttctttttaacttcaggcgggttacaatagtttccagtaagtattctggaggctgcatccatgacacaggcaaacctgagcgaaaccctgttcaaaccccgctttaaacatcctgaaacctcgacgctagtccgccgctttaatcacggcgcacaaccgcctgtgcagtcggcccttgatggtaaaaccatccctcactggtatcgcatgattaaccgtctgatgtggatctggcgcggcattgacccacgcgaaatcctcgacgtccaggcacgtattgtgatgagcgatgccgaacgtaccgacgatgatttatacgatacggtgattggctaccgtggcggcaactggatttatgagtgggccccggatctttgtgaaggaaccttacttctgtggtgtgacataattggacaaactacctacagagatttaaagctctaaggtaaatataaaatttttaagtgtataatgtgttaaactactgattctaattgtttgtgtattttagattccaacctatggaactgatgaatgggagcagtggtggaatgcctttaatgaggaaaacctgttttgctcagaagaaatgccatctagtgatgatgaggctactgctgactctcaacattctactcctccaaaaaagaagagaaaggtagaagaccccaaggactttccttcagaattgctaagttttttgagtcatgctgtgtttagtaatagaactcttgcttgctttgctatttacaccacaaaggaaaaagctgcactgctatacaagaaaattatggaaaaatattctgtaacctttataagtaggcataacagttataatcataacatactgttttttcttactccacacaggcatagagtgtctgctattaataactatgctcaaaaattgtgtacctttagctttttaatttgtaaaggggttaataaggaatatttgatgtatagtgccttgactagagatcataatcagccataccacatttgtagaggttttacttgctttaaaaaacctcccacacctccccctgaacctgaaacataaaatgaatgcaattgttgttgttaacttgtttattgcagcttataatggttacaaataaagcaatagcatcacaaatttcacaaataaagcatttttttcactgcattctagttgtggtttgtccaaactcatcaatgtatcttatcatgtctggatcaactggataactcaagctaaccaaaatcatcccaaacttcccaccccataccctattaccactgccaattacctagtggtttcatttactctaaacctgtgattcctctgaattattttcattttaaagaaattgtatttgttaaatatgtactacaaacttagtagttggaagggctaattcactcccaaagaagacaagatatccttgatctgtggatctaccacacacaaggctacttccctgattagcagaactacacaccagggccaggggtcagatatccactgacctttggatggtgctacaagctagtaccagttgagccagataaggtagaagaggccaataaaggagagaacaccagcttgttacaccctgtgagcctgcatgggatggatgacccggagagagaagtgttagagtggaggtttgacagccgcctagcatttcatcacgtggcccgagagctgcatccggagtacttcaagaactgctgatatcgagcttgctacaagggactttccgctggggactttccagggaggcgtggcctgggcgggactggggagtggcgagccctcagatcctgcatataagcagctgctttttgcctgtactgggtctctctggttagaccagatctgagcctgggagctctctggctaactagggaacccactgcttaagcctcaataaagcttgccttgagtgcttcaagtagtgtgtgcccgtctgttgtgtgactctggtaactagagatccctcagacccttttagtcagtgtggaaaatctctagcagtggcgcccgaacagggacttgaaagcgaaagggaaaccagaggagctctctcgacgcaggactcggcttgctgaagcgcgcacggcaagaggcgaggggcggcgactggtgagtacgccaaaaattttgactagcggaggctagaaggagagagatgggtgcgagagcgtcagtattaagcgggggagaattagatcgcgatgggaaaaaattcggttaaggccagggggaaagaaaaaatataaattaaaacatatagtatgggcaagcagggagctagaacgattcgcagttaatcctggcctgttagaaacatcagaaggctgtagacaaatactgggacagctacaaccatcccttcagacaggatcagaagaacttagatcattatataatacagtagcaaccctctattgtgtgcatcaaaggatagagataaaagacaccaaggaagctttagacaagatagaggaagagcaaaacaaaagtaagaccaccgcacagcaagcggccggccgctgatcttcagacctggaggaggagatatgagggacaattggagaagtgaattatataaatataaagtagtaaaaattgaaccattaggagtagcacccaccaaggcaaagagaagagtggtgcagagagaaaaaagagcagtgggaataggagctttgttccttgggttcttgggagcagcaggaagcactatgggcgcagcgtcaatgacgctgacggtacaggccagacaattattgtctggtatagtgcagcagcagaacaatttgctgagggctattgaggcgcaacagcatctgttgcaactcacagtctggggcatcaagcagctccaggcaagaatcctggctgtgaaagatacctaaaggatcaacagctcctggggatttggggttgctctggaaaactcatttgcaccactgctgtgccttggaatgctagttggagtaataaatctctggaacagatttggaatcacacgacctggatggagtgggacagagaaattaacaattacacaagcttaatacactccttaattgaagaatcgcaaaaccagcaagaaaagaatgaacaagaattattggaattagataaatgggcaagtttgtggaattggtttaacataacaaattggctgtggtatataaaattattcataatgatagtaggaggcttggtaggtttaagaatagtttttgctgtactttctatagtgaatagagttaggcagggatattcaccattatcgtttcagacccacctcccaaccccgaggggacccgacaggcccgaaggaatagaagaagaaggtggagagagagacagagacagatccattcgattagtgaacggatctcgacggtatcgccaaatggcagtattcatccacaattttaaaagaaaaggggggattggggggtacagtgcaggggaaagaatagtagacataatagcaacagacatacaaactaaagaattacaaaaacaaattacaaaaattcaaaattttcgggtttattacagggacagcagagatccagtttggatcgataagcttgatatcgaattcctgcagccccgataaaataaaagattttatttagtctccagaaaaaggggggaatgaaagaccccacctgtaggtttggcaagctagctgcagtaacgccattttgcaaggcatggaaaaataccaaaccaagaatagagaagttcagatcaagggcgggtacatgaaaatagctaacgttgggccaaacaggatatctgcggtgagcagtttcggccccggcccggggccaagaacagatggtcaccgcagtttcggccccggcccgaggccaagaacagatggtccccagatatggcccaaccctcagcagtttcttaagacccatcagatgtttccaggctcccccaaggacctgaaatgaccctgcgccttatttgaattaaccaatcagcctgcttctcgcttctgttcgcgcgcttctgcttcccgagctctataaaagagctcacaacccctcactcggcgcgccagtcctccgacagactgagtcgcccgggggggatctggagctctcgagaattctcacgcgtgccgccaccatggccttaccagtgaccgccttgctcctgccgctggccttgctgctccacgccgccaggccgaaatacctattgcctacggcagccgctggattgttattactcgcggcccagccggccatggcccaggtgcagctggtgcagtctggggcagaggtgaaaaagcccggggagtctctgaagatctcctgtaagggttctggatacagctttaccagctactggatcgcctgggtgcgccagatgcccgggaaaggcctggagtacatggggctcatctatcctggtgactctgacaccaaatacagcccgtccttccaaggccaggtcaccatctcagtcgacaagtccgtcagcactgcctacttgcaatggagcagtctgaagccctcggacagcgccgtgtatttttgtgcgagacatgacgtgggatattgcaccgaccggacttgcgcaaagtggcctgaatacttccagcattggggccagggcaccctggtcaccgtctcctcaggtggaggcggttcaggcggaggtggctctggcggtggcggatcgcagtctgtgttgacgcagccgccctcagtgtctgcggccccaggacagaaggtcaccatctcctgctctggaagcagctccaacattgggaataattatgtatcctggtaccagcagctcccaggaacagcccccaaactcctcatctatgatcacaccaatcggcccgcaggggtccctgaccgattctctggctccaagtctggcacctcagcctccctggccatcagtgggttccggtccgaggatgaggctgattattactgtgcctcctgggactacaccctctcgggctgggtgttcggcggagggaccaagctgaccgtcctaggtgggaagcctatcccgaaccctctgttgggtctcgatagtaccaatggggccgcaaccacgacgccagcgccgcgaccaccaacaccggcgcccaccatcgcgttgcagcccctgtccctgcgcccagaggcgtgccggccagcggcggggggcgcagtgcacacgagggggctggacttcgcctgtgatttttgggtgctggtggtggttggtggagtcctggcttgctatagcttgctagtaacagtggcctttattattttctgggtgaggagtaagaggagcaggctcctgcacagtgactacatgaacatgactccccgccgccccgggcccacccgcaagcattaccagccctatgccccaccacgcgacttcgcagcctatcgctccgaggacgtggtgtgctgccactcaatctacggcaagaagaagggtgatatcgacacctaccgatacataggctcttccgggacaggctgcgtggtcatagtgggcaggatcgtcttgtccggatccggcactagtgcgcccatcacggcgtacgcccagcagacgagaggcctcctagggtgtataatcaccagcctgactggccgggacaaaaaccaagtggagggtgaggtccagatcgtgtcaactgctacccaaaccttcctggcaacgtgcatcaatggggtatgctgggcagtctaccacggggccggaacgaggaccatcgcatcacccaagggtcctgtcatccagatgtataccaatgtggaccaagaccttgtgggctggcccgctcctcaaggttcccgctcattgacaccctgtacctgcggctcctcggacctttacctggtcacgaggcacgccgatgtcattcccgtgcgccggcgaggtgatagcaggggtagcctgctttcgccccggcccatttcctacttgaaaggctcctcggggggtccgctgttgtgccccgcgggacacgccgtgggcctattcagggccgcggtgtgcacccgtggagtggctaaagcggtggactttatccctgtggagaacctagagacaaccatgagatccccggtgttcacggacaactcctctccaccagcagtcaccctgacgcacccaatcaccaaaatcgatagggaggttctctaccaggagttcgatgagatggaagagtgctctcagcactatccctacgatgtgcccgattacgctaaacggggcagaaagaaactcctgtatatattcaaacaaccatttatgagaccagtacaaactactcaagaggaagatggctgtagctgccgatttccagaagaagaagaaggaggatgtgaactgagagtgaagttcagcaggagcgcagacgcccccgcgtacaagcagggccagaaccagctctataacgagctcaatctaggacgaagagaggagtacgatgttttggacaagagacgtggccgggaccctgagatggggggaaagccgagaaggaagaaccctcaggaaggcctgtacaatgaactgcagaaagataagatggcggaggcctacagtgagattgggatgaaaggcgagcgccggaggggcaaggggcacgatggcctttaccagggtctcagtacagccaccaaggacacctacgacgcccttcacatgcaggccctgccccctcgctaaactagtgcggccgcgactctagagtcgacctgcaggcatgcaagcttgatatcaagcttatcgataatcaacctctggattacaaaatttgtgaaagattgactggtattcttaactatgttgctccttttacgctatgtggatacgctgctttaatgcctttgtatcatgctattgcttcccgtatggctttcattttctcctccttgtataaatcctggttgctgtctctttatgaggagttgtggcccgttgtcaggcaacgtggcgtggtgtgcactgtgtttgctgacgcaacccccactggttggggcattgccaccacctgtcagctcctttccgggactttcgctttccccctccctattgccacggcggaactcatcgccgcctgccttgcccgctgctggacaggggctcggctgttgggcactgacaattccgtggtgttgtcggggaaatcatcgtcctttccttggctgctcgcctgtgttgccacctggattctgcgcgggacgtccttctgctacgtcccttcggccctcaatccagcggaccttccttcccgcggcctgctgccggctctgcggcctcttccgcgtcttcgccttcgccctcagacgagtcggatctccctttgggccgcctccccgcat

SEQ ID NO: 253 - DNA, 11542 bp, Artificial Sequence
  synthetic vector
cgataccgtcgacctcgagggaattaattcgagctcggtacctttaagaccaatgacttacaaggcagctgtagatcttagccactttttaaaagaaaaggggggactggaagggctaattcactcccaacgaagacaagatctgctttttgcttgtactgggtctctctggttagaccagatctgagcctgggagctctctggctaactagggaacccactgcttaagcctcaataaagcttgccttgagtgcttcaagtagtgtgtgcccgtctgttgtgtgactctggtaactagagatccctcagacccttttagtcagtgtggaaaatctctagcagcatctagaattaattccgtgtattctatagtgtcacctaaatcgtatgtgtatgatacataaggttatgtattaattgtagccgcgttctaacgacaatatgtacaagcctaattgtgtagcatctggcttactgaagcagaccctatcatctctctcgtaaactgccgtcagagtcggtttggttggacgaaccttctgagtttctggtaacgccgtcccgcacccggaaatggtcagcgaaccaatcagcagggtcatcgctagccagatcctctacgccggacgcatcgtggccggcatcaccggcgccacaggtgcggttgctggcgcctatatcgccgacatcaccgatggggaagatcgggctcgccacttcgggctcatgagcgcttgtttcggcgtgggtatggtggcaggccccgtggccgggggactgttgggcgccatctccttgcatgcaccattccttgcggcggcggtgctcaacggcctcaacctactactgggctgcttcctaatgcaggagtcgcataagggagagcgtcgaatggtgcactctcagtacaatctgctctgatgccgcatagttaagccagccccgacacccgccaacacccgctgacgcgccctgacgggcttgtctgctcccggcatccgcttacagacaagctgtgaccgtctccgggagctgcatgtgtcagaggttttcaccgtcatcaccgaaacgcgcgagacgaaagggcctcgtgatacgcctatttttataggttaatgtcatgataataatggtttcttagacgtcaggtggcacttttcggggaaatgtgcgcggaacccctatttgtttatttttctaaatacattcaaatatgtatccgctcatgagacaataaccctgataaatgcttcaataatattgaaaaaggaagagtatgagtattcaacatttccgtgtcgcccttattcccttttttgcggcattttgccttcctgtttttgctcacccagaaacgctggtgaaagtaaaagatgctgaagatcagttgggtgcacgagtgggttacatcgaactggatctcaacagcggtaagatccttgagagttttcgccccgaagaacgttttccaatgatgagcacttttaaagttctgctatgtggcgcggtattatcccgtattgacgccgggcaagagcaactcggtcgccgcatacactattctcagaatgacttggttgagtactcaccagtcacagaaaagcatcttacggatggcatgacagtaagagaattatgcagtgctgccataaccatgagtgataacactgcggccaacttacttctgacaacgatcggaggaccgaaggagctaaccgcttttttgcacaacatgggggatcatgtaactcgccttgatcgttgggaaccggagctgaatgaagccataccaaacgacgagcgtgacaccacgatgcctgtagcaatggcaacaacgttgcgcaaactattaactggcgaactacttactctagcttcccggcaacaattaatagactggatggaggcggataaagttgcaggaccacttctgcgctcggcccttccggctggctggtttattgctgataaatctggagccggtgagcgtgggtctcgcggtatcattgcagcactggggccagatggtaagccctcccgtatcgtagttatctacacgacggggagtcaggcaactatggatgaacgaaatagacagatcgctgagataggtgcctcactgattaagcattggtaactgtcagaccaagtttactcatatatactttagattgatttaaaacttcatttttaatttaaaaggatctaggtgaagatcctttttgataatctcatgaccaaaatcccttaacgtgagttttcgttccactgagcgtcagaccccgtagaaaagatcaaaggatcttcttgagatcctttttttctgcgcgtaatctgctgcttgcaaacaaaaaaaccaccgctaccagcggtggtttgtttgccggatcaagagctaccaactctttttccgaaggtaactggcttcagcagagcgcagataccaaatactgtctttctagtgtagccgtagttaggccaccacttcaagaactctgtagcaccgcctacatacctcgctctgctaatcctgttaccagtggctgctgccagtggcgataagtcgtgtcttaccgggttggactcaagacgatagttaccggataaggcgcagcggtcgggctgaacggggggttcgtgcacacagcccagcttggagcgaacgacctacaccgaactgagatacctacagcgtgagctatgagaaagcgccacgcttcccgaagggagaaaggcggacaggtatccggtaagcggcagggtcggaacaggagagcgcacgagggagcttccagggggaaacgcctggtatctttatagtcctgtcgggtttcgccacctctgacttgagcgtcgatttttgtgatgctcgtcaggggggcggagcctatggaaaaacgccagcaacgcggcctttttacggttcctggccttttgctggccttttgctcacatgttctttcctgcgttatcccctgattctgtggataaccgtattaccgcctttgagtgagctgataccgctcgccgcagccgaacgaccgagcgcagcgagtcagtgagcgaggaagcggaagagcgcccaatacgcaaaccgcctctccccgcgcgttggccgattcattaatgcagctgtggaatgtgtgtcagttagggtgtggaaagtccccaggctccccagcaggcagaagtatgcaaagcatgcatctcaattagtcagcaaccaggtgtggaaagtccccaggctccccagcaggcagaagtatgcaaagcatgcatctcaattagtcagcaaccatagtcccgcccctaactccgcccatcccgcccctaactccgcccagttccgcccattctccgccccatggctgactaattttttttatttatgcagaggccgaggccgcctcggcctctgagctattccagaagtagtgaggaggcttttttggaggcctaggcttttgcaaaaagcttggacacaagacaggcttgcgagatatgtttgagaataccactttatcccgcgtcagggagaggcagtgcgtaaaaagacgcggactcatgtgaaatactggtttttagtgcgccagatctctataatctcgcgcaacctattttcccctcgaacactttttaagccgtagataaacaggctgggacacttcacatgagcgaaaaatacatcgtcacctgggacatgttgcagatccatgcacgtaaactcgcaagccgactgatgccttctgaacaatggaaaggcattattgccgtaagccgtggcggtctgtaccgggtgcgttactggcgcgtgaactgggtattcgtcatgtcgataccgtttgtatttccagctacgatcacgacaaccagcgcgagcttaaagtgctgaaacgcgcagaaggcgatggcgaaggcttcatcgttattgatgacctggtggataccggtggtactgcggttgcgattcgtgaaatgtatccaaaagcgcactttgtcaccatcttcgcaaaaccggctggtcgtccgctggttgatgactatgttgttgatatcccgcaagatacctggattgaacagccgtgggatatgggcgtcgtattcgtcccgccaatctccggtcgctaatcttttcaacgcctggcactgccgggcgttgttctttttaacttcaggcgggttacaatagtttccagtaagtattctggaggctgcatccatgacacaggcaaacctgagcgaaaccctgttcaaaccccgctttaaacatcctgaaacctcgacgctagtccgccgctttaatcacggcgcacaaccgcctgtgcagtcggcccttgatggtaaaaccatccctcactggtatcgcatgattaaccgtctgatgtggatctggcgcggcattgacccacgcgaaatcctcgacgtccaggcacgtattgtgatgagcgatgccgaacgtaccgacgatgatttatacgatacggtgattggctaccgtggcggcaactggatttatgagtgggccccggatctttgtgaaggaaccttacttctgtggtgtgacataattggacaaactacctacagagatttaaagctctaaggtaaatataaaatttttaagtgtataatgtgttaaactactgattctaattgtttgtgtattttagattccaacctatggaactgatgaatgggagcagtggtggaatgcctttaatgaggaaaacctgttttgctcagaagaaatgccatctagtgatgatgaggctactgctgactctcaacattctactcctccaaaaaagaagagaaaggtagaagaccccaaggactttccttcagaattgctaagttttttgagtcatgctgtgtttagtaatagaactcttgcttgctttgctatttacaccacaaaggaaaaagctgcactgctatacaagaaaattatggaaaaatattctgtaacctttataagtaggcataacagttataatcataacatactgttttttcttactccacacaggcatagagtgtctgctattaataactatgctcaaaaattgtgtacctttagctttttaatttgtaaaggggttaataaggaatatttgatgtatagtgccttgactagagatcataatcagccataccacatttgtagaggttttacttgctttaaaaaacctcccacacctccccctgaacctgaaacataaaatgaatgcaattgttgttgttaacttgtttattgcagcttataatggttacaaataaagcaatagcatcacaaatttcacaaataaagcatttttttcactgcattctagttgtggtttgtccaaactcatcaatgtatcttatcatgtctggatcaactggataactcaagctaaccaaaatcatcccaaacttcccaccccataccctattaccactgccaattacctagtggtttcatttactctaaacctgtgattcctctgaattattttcattttaaagaaattgtatttgttaaatatgtactacaaacttagtagttggaagggctaattcactcccaaagaagacaagatatccttgatctgtggatctaccacacacaaggctacttccctgattagcagaactacacaccagggccaggggtcagatatccactgacctttggatggtgctacaagctagtaccagttgagccagataaggtagaagaggccaataaaggagagaacaccagcttgttacaccctgtgagcctgcatgggatggatgacccggagagagaagtgttagagtggaggtttgacagccgcctagcatttcatcacgtggcccgagagctgcatccggagtacttcaagaactgctgatatcgagcttgctacaagggactttccgctggggactttccagggaggcgtggcctgggcgggactggggagtggcgagccctcagatcctgcatataagcagctgctttttgcctgtactgggtctctctggttagaccagatctgagcctgggagctctctggctaactagggaacccactgcttaagcctcaataaagcttgccttgagtgcttcaagtagtgtgtgcccgtctgttgtgtgactctggtaactagagatccctcagacccttttagtcagtgtggaaaatctctagcagtggcgcccgaacagggacttgaaagcgaaagggaaaccagaggagctctctcgacgcaggactcggcttgctgaagcgcgcacggcaagaggcgaggggcggcgactggtgagtacgccaaaaattttgactagcggaggctagaaggagagagatgggtgcgagagcgtcagtattaagcgggggagaattagatcgcgatgggaaaaaattcggttaaggccagggggaaagaaaaaatataaattaaaacatatagtatgggcaagcagggagctagaacgattcgcagttaatcctggcctgttagaaacatcagaaggctgtagacaaatactgggacagctacaaccatcccttcagacaggatcagaagaacttagatcattatataatacagtagcaaccctctattgtgtgcatcaaaggatagagataaaagacaccaaggaagctttagacaagatagaggaagagcaaaacaaaagtaagaccaccgcacagcaagcggccggccgctgatcttcagacctggaggaggagatatgagggacaattggagaagtgaattatataaatataaagtagtaaaaattgaaccattaggagtagcacccaccaaggcaaagagaagagtggtgcagagagaaaaaagagcagtgggaataggagctttgttccttgggttcttgggagcagcaggaagcactatgggcgcagcgtcaatgacgctgacggtacaggccagacaattattgtctggtatagtgcagcagcagaacaatttgctgagggctattgaggcgcaacagcatctgttgcaactcacagtctggggcatcaagcagctccaggcaagaatcctggctgtgaaagatacctaaaggatcaacagctcctggggatttggggttgctctggaaaactcatttgcaccactgctgtgccttggaatgctagttggagtaataaatctctggaacagatttggaatcacacgacctggatggagtgggacagagaaattaacaattacacaagcttaatacactccttaattgaagaatcgcaaaaccagcaagaaaagaatgaacaagaattattggaattagataaatgggcaagtttgtggaattggtttaacataacaaattggctgtggtatataaaattattcataatgatagtaggaggcttggtaggtttaagaatagtttttgctgtactttctatagtgaatagagttaggcagggatattcaccattatcgtttcagacccacctcccaaccccgaggggacccgacaggcccgaaggaatagaagaagaaggtggagagagagacagagacagatccattcgattagtgaacggatctcgacggtatcgccaaatggcagtattcatccacaattttaaaagaaaaggggggattggggggtacagtgcaggggaaagaatagtagacataatagcaacagacatacaaactaaagaattacaaaaacaaattacaaaaattcaaaattttcgggtttattacagggacagcagagatccagtttggatcgataagcttgatatcgaattcctgcagccccgataaaataaaagattttatttagtctccagaaaaaggggggaatgaaagaccccacctgtaggtttggcaagctagctgcagtaacgccattttgcaaggcatggaaaaataccaaaccaagaatagagaagttcagatcaagggcgggtacatgaaaatagctaacgttgggccaaacaggatatctgcggtgagcagtttcggccccggcccggggccaagaacagatggtcaccgcagtttcggccccggcccgaggccaagaacagatggtccccagatatggcccaaccctcagcagtttcttaagacccatcagatgtttccaggctcccccaaggacctgaaatgaccctgcgccttatttgaattaaccaatcagcctgcttctcgcttctgttcgcgcgcttctgcttcccgagctctataaaagagctcacaacccctcactcggcgcgccagtcctccgacagactgagtcgcccgggggggatctggagctctcgagaattctcacgcgtgccgccaccatggccttaccagtgaccgccttgctcctgccgctggccttgctgctccacgccgccaggccgaaatacctattgcctacggcagccgctggattgttattactcgcggcccagccggccatggcccaggtgcagctggtgcagtctggggcagaggtgaaaaagcccggggagtctctgaagatctcctgtaagggttctggatacagctttaccagctactggatcgcctgggtgcgccagatgcccgggaaaggcctggagtacatggggctcatctatcctggtgactctgacaccaaatacagcccgtccttccaaggccaggtcaccatctcagtcgacaagtccgtcagcactgcctacttgcaatggagcagtctgaagccctcggacagcgccgtgtatttttgtgcgagacatgacgtgggatattgcaccgaccggacttgcgcaaagtggcctgaatacttccagcattggggccagggcaccctggtcaccgtctcctcaggtggaggcggttcaggcggaggtggctctggcggtggcggatcgcagtctgtgttgacgcagccgccctcagtgtctgcggccccaggacagaaggtcaccatctcctgctctggaagcagctccaacattgggaataattatgtatcctggtaccagcagctcccaggaacagcccccaaactcctcatctatgatcacaccaatcggcccgcaggggtccctgaccgattctctggctccaagtctggcacctcagcctccctggccatcagtgggttccggtccgaggatgaggctgattattactgtgcctcctgggactacaccctctcgggctgggtgttcggcggagggaccaagctgaccgtcctaggtgggaagcctatcccgaaccctctgttgggtctcgatagtaccaatggggccgcaaccacgacgccagcgccgcgaccaccaacaccggcgcccaccatcgcgttgcagcccctgtccctgcgcccagaggcgtgccggccagcggcggggggcgcagtgcacacgagggggctggacttcgcctgtgatttttgggtgctggtggtggttggtggagtcctggcttgctatagcttgctagtaacagtggcctttattattttctgggtgaggagtaagaggagcaggctcctgcacagtgactacatgaacatgactccccgccgccccgggcccacccgcaagcattaccagccctatgccccaccacgcgacttcgcagcctatcgctccaaacggggcagaaagaaactcctgtatatattcaaacaaccatttatgagaccagtacaaactactcaagaggaagatggctgtagctgccgatttccagaagaagaagaaggaggatgtgaactggaggacgtggtgtgctgccactcaatctacggcaagaagaagggtgatatcgacacctaccgatacataggctcttccgggacaggctgcgtggtcatagtgggcaggatcgtcttgtccggatccggcactagtgcgcccatcacggcgtacgcccagcagacgagaggcctcctagggtgtataatcaccagcctgactggccgggacaaaaaccaagtggagggtgaggtccagatcgtgtcaactgctacccaaaccttcctggcaacgtgcatcaatggggtatgctgggcagtctaccacggggccggaacgaggaccatcgcatcacccaagggtcctgtcatccagatgtataccaatgtggaccaagaccttgtgggctggcccgctcctcaaggttcccgctcattgacaccctgtacctgcggctcctcggacctttacctggtcacgaggcacgccgatgtcattcccgtgcgccggcgaggtgatagcaggggtagcctgctttcgccccggcccatttcctacttgaaaggctcctcggggggtccgctgttgtgccccgcgggacacgccgtgggcctattcagggccgcggtgtgcacccgtggagtggctaaagcggtggactttatccctgtggagaacctagagacaaccatgagatccccggtgttcacggacaactcctctccaccagcagtcaccctgacgcacccaatcaccaaaatcgatagggaggttctctaccaggagttcgatgagatggaagagtgctctcagcactatccctacgatgtgcccgattacgctagagtgaagttcagcaggagcgcagacgcccccgcgtacaagcagggccagaaccagctctataacgagctcaatctaggacgaagagaggagtacgatgttttggacaagagacgtggccgggaccctgagatggggggaaagccgagaaggaagaaccctcaggaaggcctgtacaatgaactgcagaaagataagatggcggaggcctacagtgagattgggatgaaaggcgagcgccggaggggcaaggggcacgatggcctttaccagggtctcagtacagccaccaaggacacctacgacgcccttcacatgcaggccctgccccctcgctaaactagtgcggccgcgactctagagtcgacctgcaggcatgcaagcttgatatcaagcttatcgataatcaacctctggattacaaaatttgtgaaagattgactggtattcttaactatgttgctccttttacgctatgtggatacgctgctttaatgcctttgtatcatgctattgcttcccgtatggctttcattttctcctccttgtataaatcctggttgctgtctctttatgaggagttgtggcccgttgtcaggcaacgtggcgtggtgtgcactgtgtttgctgacgcaacccccactggttggggcattgccaccacctgtcagctcctttccgggactttcgctttccccctccctattgccacggcggaactcatcgccgcctgccttgcccgctgctggacaggggctcggctgttgggcactgacaattccgtggtgttgtcggggaaatcatcgtcctttccttggctgctcgcctgtgttgccacctggattctgcgcgggacgtccttctgctacgtcccttcggccctcaatccagcggaccttccttcccgcggcctgctgccggctctgcggcctcttccgcgtcttcgccttcgccctcagacgagtcggatctccctttgggccgcctccccgcat

SEQ ID NO: 254 - DNA, 13017 bp, Artificial Sequence
  synthetic vector
cgataccgtcgacctcgagggaattaattcgagctcggtacctttaagaccaatgacttacaaggcagctgtagatcttagccactttttaaaagaaaaggggggactggaagggctaattcactcccaacgaagacaagatctgctttttgcttgtactgggtctctctggttagaccagatctgagcctgggagctctctggctaactagggaacccactgcttaagcctcaataaagcttgccttgagtgcttcaagtagtgtgtgcccgtctgttgtgtgactctggtaactagagatccctcagacccttttagtcagtgtggaaaatctctagcagcatctagaattaattccgtgtattctatagtgtcacctaaatcgtatgtgtatgatacataaggttatgtattaattgtagccgcgttctaacgacaatatgtacaagcctaattgtgtagcatctggcttactgaagcagaccctatcatctctctcgtaaactgccgtcagagtcggtttggttggacgaaccttctgagtttctggtaacgccgtcccgcacccggaaatggtcagcgaaccaatcagcagggtcatcgctagccagatcctctacgccggacgcatcgtggccggcatcaccggcgccacaggtgcggttgctggcgcctatatcgccgacatcaccgatggggaagatcgggctcgccacttcgggctcatgagcgcttgtttcggcgtgggtatggtggcaggccccgtggccgggggactgttgggcgccatctccttgcatgcaccattccttgcggcggcggtgctcaacggcctcaacctactactgggctgcttcctaatgcaggagtcgcataagggagagcgtcgaatggtgcactctcagtacaatctgctctgatgccgcatagttaagccagccccgacacccgccaacacccgctgacgcgccctgacgggcttgtctgctcccggcatccgcttacagacaagctgtgaccgtctccgggagctgcatgtgtcagaggttttcaccgtcatcaccgaaacgcgcgagacgaaagggcctcgtgatacgcctatttttataggttaatgtcatgataataatggtttcttagacgtcaggtggcacttttcggggaaatgtgcgcggaacccctatttgtttatttttctaaatacattcaaatatgtatccgctcatgagacaataaccctgataaatgcttcaataatattgaaaaaggaagagtatgagtattcaacatttccgtgtcgcccttattcccttttttgcggcattttgccttcctgtttttgctcacccagaaacgctggtgaaagtaaaagatgctgaagatcagttgggtgcacgagtgggttacatcgaactggatctcaacagcggtaagatccttgagagttttcgccccgaagaacgttttccaatgatgagcacttttaaagttctgctatgtggcgcggtattatcccgtattgacgccgggcaagagcaactcggtcgccgcatacactattctcagaatgacttggttgagtactcaccagtcacagaaaagcatcttacggatggcatgacagtaagagaattatgcagtgctgccataaccatgagtgataacactgcggccaacttacttctgacaacgatcggaggaccgaaggagctaaccgcttttttgcacaacatgggggatcatgtaactcgccttgatcgttgggaaccggagctgaatgaagccataccaaacgacgagcgtgacaccacgatgcctgtagcaatggcaacaacgttgcgcaaactattaactggcgaactacttactctagcttcccggcaacaattaatagactggatggaggcggataaagttgcaggaccacttctgcgctcggcccttccggctggctggtttattgctgataaatctggagccggtgagcgtgggtctcgcggtatcattgcagcactggggccagatggtaagccctcccgtatcgtagttatctacacgacggggagtcaggcaactatggatgaacgaaatagacagatcgctgagataggtgcctcactgattaagcattggtaactgtcagaccaagtttactcatatatactttagattgatttaaaacttcatttttaatttaaaaggatctaggtgaagatcctttttgataatctcatgaccaaaatcccttaacgtgagttttcgttccactgagcgtcagaccccgtagaaaagatcaaaggatcttcttgagatcctttttttctgcgcgtaatctgctgcttgcaaacaaaaaaaccaccgctaccagcggtggtttgtttgccggatcaagagctaccaactctttttccgaaggtaactggcttcagcagagcgcagataccaaatactgtctttctagtgtagccgtagttaggccaccacttcaagaactctgtagcaccgcctacatacctcgctctgctaatcctgttaccagtggctgctgccagtggcgataagtcgtgtcttaccgggttggactcaagacgatagttaccggataaggcgcagcggtcgggctgaacggggggttcgtgcacacagcccagcttggagcgaacgacctacaccgaactgagatacctacagcgtgagctatgagaaagcgccacgcttcccgaagggagaaaggcggacaggtatccggtaagcggcagggtcggaacaggagagcgcacgagggagcttccagggggaaacgcctggtatctttatagtcctgtcgggtttcgccacctctgacttgagcgtcgatttttgtgatgctcgtcaggggggcggagcctatggaaaaacgccagcaacgcggcctttttacggttcctggccttttgctggccttttgctcacatgttctttcctgcgttatcccctgattctgtggataaccgtattaccgcctttgagtgagctgataccgctcgccgcagccgaacgaccgagcgcagcgagtcagtgagcgaggaagcggaagagcgcccaatacgcaaaccgcctctccccgcgcgttggccgattcattaatgcagctgtggaatgtgtgtcagttagggtgtggaaagtccccaggctccccagcaggcagaagtatgcaaagcatgcatctcaattagtcagcaaccaggtgtggaaagtccccaggctccccagcaggcagaagtatgcaaagcatgcatctcaattagtcagcaaccatagtcccgcccctaactccgcccatcccgcccctaactccgcccagttccgcccattctccgccccatggctgactaattttttttatttatgcagaggccgaggccgcctcggcctctgagctattccagaagtagtgaggaggcttttttggaggcctaggcttttgcaaaaagcttggacacaagacaggcttgcgagatatgtttgagaataccactttatcccgcgtcagggagaggcagtgcgtaaaaagacgcggactcatgtgaaatactggtttttagtgcgccagatctctataatctcgcgcaacctattttcccctcgaacactttttaagccgtagataaacaggctgggacacttcacatgagcgaaaaatacatcgtcacctgggacatgttgcagatccatgcacgtaaactcgcaagccgactgatgccttctgaacaatggaaaggcattattgccgtaagccgtggcggtctgtaccgggtgcgttactggcgcgtgaactgggtattcgtcatgtcgataccgtttgtatttccagctacgatcacgacaaccagcgcgagcttaaagtgctgaaacgcgcagaaggcgatggcgaaggcttcatcgttattgatgacctggtggataccggtggtactgcggttgcgattcgtgaaatgtatccaaaagcgcactttgtcaccatcttcgcaaaaccggctggtcgtccgctggttgatgactatgttgttgatatcccgcaagatacctggattgaacagccgtgggatatgggcgtcgtattcgtcccgccaatctccggtcgctaatcttttcaacgcctggcactgccgggcgttgttctttttaacttcaggcgggttacaatagtttccagtaagtattctggaggctgcatccatgacacaggcaaacctgagcgaaaccctgttcaaaccccgctttaaacatcctgaaacctcgacgctagtccgccgctttaatcacggcgcacaaccgcctgtgcagtcggcccttgatggtaaaaccatccctcactggtatcgcatgattaaccgtctgatgtggatctggcgcggcattgacccacgcgaaatcctcgacgtccaggcacgtattgtgatgagcgatgccgaacgtaccgacgatgatttatacgatacggtgattggctaccgtggcggcaactggatttatgagtgggccccggatctttgtgaaggaaccttacttctgtggtgtgacataattggacaaactacctacagagatttaaagctctaaggtaaatataaaatttttaagtgtataatgtgttaaactactgattctaattgtttgtgtattttagattccaacctatggaactgatgaatgggagcagtggtggaatgcctttaatgaggaaaacctgttttgctcagaagaaatgccatctagtgatgatgaggctactgctgactctcaacattctactcctccaaaaaagaagagaaaggtagaagaccccaaggactttccttcagaattgctaagttttttgagtcatgctgtgtttagtaatagaactcttgcttgctttgctatttacaccacaaaggaaaaagctgcactgctatacaagaaaattatggaaaaatattctgtaacctttataagtaggcataacagttataatcataacatactgttttttcttactccacacaggcatagagtgtctgctattaataactatgctcaaaaattgtgtacctttagctttttaatttgtaaaggggttaataaggaatatttgatgtatagtgccttgactagagatcataatcagccataccacatttgtagaggttttacttgctttaaaaaacctcccacacctccccctgaacctgaaacataaaatgaatgcaattgttgttgttaacttgtttattgcagcttataatggttacaaataaagcaatagcatcacaaatttcacaaataaagcatttttttcactgcattctagttgtggtttgtccaaactcatcaatgtatcttatcatgtctggatcaactggataactcaagctaaccaaaatcatcccaaacttcccaccccataccctattaccactgccaattacctagtggtttcatttactctaaacctgtgattcctctgaattattttcattttaaagaaattgtatttgttaaatatgtactacaaacttagtagttggaagggctaattcactcccaaagaagacaagatatccttgatctgtggatctaccacacacaaggctacttccctgattagcagaactacacaccagggccaggggtcagatatccactgacctttggatggtgctacaagctagtaccagttgagccagataaggtagaagaggccaataaaggagagaacaccagcttgttacaccctgtgagcctgcatgggatggatgacccggagagagaagtgttagagtggaggtttgacagccgcctagcatttcatcacgtggcccgagagctgcatccggagtacttcaagaactgctgatatcgagcttgctacaagggactttccgctggggactttccagggaggcgtggcctgggcgggactggggagtggcgagccctcagatcctgcatataagcagctgctttttgcctgtactgggtctctctggttagaccagatctgagcctgggagctctctggctaactagggaacccactgcttaagcctcaataaagcttgccttgagtgcttcaagtagtgtgtgcccgtctgttgtgtgactctggtaactagagatccctcagacccttttagtcagtgtggaaaatctctagcagtggcgcccgaacagggacttgaaagcgaaagggaaaccagaggagctctctcgacgcaggactcggcttgctgaagcgcgcacggcaagaggcgaggggcggcgactggtgagtacgccaaaaattttgactagcggaggctagaaggagagagatgggtgcgagagcgtcagtattaagcgggggagaattagatcgcgatgggaaaaaattcggttaaggccagggggaaagaaaaaatataaattaaaacatatagtatgggcaagcagggagctagaacgattcgcagttaatcctggcctgttagaaacatcagaaggctgtagacaaatactgggacagctacaaccatcccttcagacaggatcagaagaacttagatcattatataatacagtagcaaccctctattgtgtgcatcaaaggatagagataaaagacaccaaggaagctttagacaagatagaggaagagcaaaacaaaagtaagaccaccgcacagcaagcggccggccgctgatcttcagacctggaggaggagatatgagggacaattggagaagtgaattatataaatataaagtagtaaaaattgaaccattaggagtagcacccaccaaggcaaagagaagagtggtgcagagagaaaaaagagcagtgggaataggagctttgttccttgggttcttgggagcagcaggaagcactatgggcgcagcgtcaatgacgctgacggtacaggccagacaattattgtctggtatagtgcagcagcagaacaatttgctgagggctattgaggcgcaacagcatctgttgcaactcacagtctggggcatcaagcagctccaggcaagaatcctggctgtgaaagatacctaaaggatcaacagctcctggggatttggggttgctctggaaaactcatttgcaccactgctgtgccttggaatgctagttggagtaataaatctctggaacagatttggaatcacacgacctggatggagtgggacagagaaattaacaattacacaagcttaatacactccttaattgaagaatcgcaaaaccagcaagaaaagaatgaacaagaattattggaattagataaatgggcaagtttgtggaattggtttaacataacaaattggctgtggtatataaaattattcataatgatagtaggaggcttggtaggtttaagaatagtttttgctgtactttctatagtgaatagagttaggcagggatattcaccattatcgtttcagacccacctcccaaccccgaggggacccgacaggcccgaaggaatagaagaagaaggtggagagagagacagagacagatccattcgattagtgaacggatctcgacggtatcgccaaatggcagtattcatccacaattttaaaagaaaaggggggattggggggtacagtgcaggggaaagaatagtagacataatagcaacagacatacaaactaaagaattacaaaaacaaattacaaaaattcaaaattttcgggtttattacagggacagcagagatccagtttggatcgataagcttgatatcgaattcctgcagcccgtgaggctccggtgcccgtcagtgggcagagcgcacatcgcccacagtccccgagaagttggggggaggggtcggcaattgaaccggtgcctagagaaggtggcgcggggtaaactgggaaagtgatgtcgtgtactggctccgcctttttcccgagggtgggggagaaccgtatataagtgcagtagtcgccgtgaacgttctttttcgcaacgggtttgccgccagaacacaggtaagtgccgtgtgtggttcccgcgggcctggcctctttacgggttatggcccttgcgtgccttgaattacttccacctggctgcagtacgtgattcttgatcccgagcttcgggttggaagtgggtgggagagttcgaggccttgcgcttaaggagccccttcgcctcgtgcttgagttgaggcctggcctgggcgctggggccgccgcgtgcgaatctggtggcaccttcgcgcctgtctcgctgctttcgataagtctctagccatttaaaatttttgatgacctgctgcgacgctttttttctggcaagatagtcttgtaaatgcgggccaagatctgcacactggtatttcggtttttggggccgcgggcggcgacggggcccgtgcgtcccagcgcacatgttcggcgaggcggggcctgcgagcgcggccaccgagaatcggacgggggtagtctcaagctggccggcctgctctggtgcctggcctcgcgccgccgtgtatcgccccgccctgggcggcaaggctggcccggtcggcaccagttgcgtgagcggaaagatggccgcttcccggccctgctgcagggagctcaaaatggaggacgcggcgctcgggagagcgggcgggtgagtcacccacacaaaggaaaagggcctttccgtcctcagccgtcgcttcatgtgactccacggagtaccgggcgccgtccaggcacctcgattagttctcgagcttttggagtacgtcgtctttaggttggggggaggggttttatgcgatggagtttccccacactgagtgggtggagactgaagttaggccagcttggcacttgatgtaattctccttggaatttgccctttttgagtttggatcttggttcattctcaagcctcagacagtggttcaaagtttttttcttccatttcaggtgtcgtgaggggatctggagctctcgagaattctcacgcgtgccgccaccatggccttaccagtgaccgccttgctcctgccgctggccttgctgctccacgccgccaggccggacatccagatgacacagactacatcctccctgtctgcctctctgggagacagagtcaccatcagttgcagggcaagtcaggacattagtaaatatttaaattggtatcagcagaaaccagatggaactgttaaactcctgatctaccatacatcaagattacactcaggagtcccatcaaggttcagtggcagtgggtctggaacagattattctctcaccattagcaacctggagcaagaagatattgccacttacttttgccaacagggtaatacgcttccgtacacgttcggaggcggcaccaagctggagatcacaggtggcggtggctcgggcggtggtgggtcgggtggcggcggatctgaggtgaaactgcaggagtcaggacctggcctggtggcgccctcacagagcctgtccgtcacatgcactgtctcaggggtctcattacccgactatggtgtaagctggattcgccagcctccacgaaagggtctggagtggctgggagtaatatggggtagtgaaaccacatactataattcagctctcaaatccagactgaccatcatcaaggacaactccaagagccaagttttcttaaaaatgaacagtctgcaaactgatgacacagccatttactactgtgccaaacattattactacggtggtagctatgctatggactactggggccaaggaacctcagtcaccgtctcctcagggaagcctatcccgaaccctctgttgggtctcgatagtaccaatggggccgcaaccacgacgccagcgccgcgaccaccaacaccggcgcccaccatcgcgttgcagcccctgtccctgcgcccagaggcgtgccggccagcggcggggggcgcagtgcacacgagggggctggacttcgcctgtgatttttgggtgctggtggtggttggtggagtcctggcttgctatagcttgctagtaacagtggcctttattattttctgggtgaggagtaagaggagcaggctcctgcacagtgactacatgaacatgactccccgccgccccgggcccacccgcaagcattaccagccctatgccccaccacgcgacttcgcagcctatcgctccgggggtaccgaattcagcgggtcaggcggatctggaagtggtggtggagaacttgatgaattggtatacttactagatgggccaggttatgaccctatacattgcgatgtagtgacaaggggcggcagccaccttttcaattttggaagcggagctactaacttcagcctgctgaagcaggctggagacgtggaggagaaccctggacctatgattcatcttggtcacatcctcttcttgctgctgttgccagttgctgccgcacaaacaaccccaggtgagaggtcaagtcttcccgccttctatccgggcacaagcgggagttgtagtgggtgtggatctttgtcccttcctatatacatctgggctcctctggctggcacttgcggagtgcttctgctgagtctggttattaccaaacggggcagaaagaaactcctgtatatattcaaacaaccatttatgagaccagtacaaactactcaagaggaagatggctgtagctgccgatttccagaagaagaagaaggaggatgtgaactgggttctgttgttattgttggtagaattattttatctggtagtggtagtatcacggcctactcccaacagacgcggggcctacttggttgcatcatcactagcctcacaggccgggacaagaaccaggtcgaaggggaggttcaagtggtttctaccgcaacacaatctttcctggcgacctgcgtcaacggcgtgtgctggactgtctaccatggcgctggctcgaagaccctagccggtccaaaaggtccaatcacccaaatgtacaccaatgtagaccaggacctcgtcggctggcaggcgcctccaggggcgcgctccttgacaccatgcacctgtggcagctcggacctttacttggtcacgagacatgctgatgtcattccggtgcgccggcgaggcgacagcaggggaagtctactctcccccaggcccgtctcctacctgaaaggctccgcaggtggtccattgctttgcccttcggggcacgctgtgggcatcttccgggctgctgtgtgcacccggggggtcgcgaaggcggtggacttcgtgcccgttgagtctatggaaactaccatgcggtctagagtgaagttcagcaggagcgcagacgcccccgcgtacaagcagggccagaaccagctctataacgagctcaatctaggacgaagagaggagtacgatgttttggacaagagacgtggccgggaccctgagatggggggaaagccgagaaggaagaaccctcaggaaggcctgtacaatgaactgcagaaagataagatggcggaggcctacagtgagattgggatgaaaggcgagcgccggaggggcaaggggcacgatggcctttaccagggtctcagtacagccaccaaggacacctacgacgcccttcacatgcaggccctgccccctcgcggcatggtgagcaagggcgaggaggataacatggccatcatcaaggagttcatgcgcttcaaggtgcacatggagggctccgtgaacggccacgagttcgagatcgagggcgagggcgagggccgcccctacgagggcacccagaccgccaagctgaaggtgaccaagggtggccccctgcccttcgcctgggacatcctgtcccctcagttcatgtacggctccaaggcctacgtgaagcaccccgccgacatccccgactacttgaagctgtccttccccgagggcttcaagtgggagcgcgtgatgaacttcgaggacggcggcgtggtgaccgtgacccaggactcctccctgcaggacggcgagttcatctacaaggtgaagctgcgcggcaccaacttcccctccgacggccccgtaatgcagaagaagaccatgggctgggaggcctcctccgagcggatgtaccccgaggacggcgccctgaagggcgagatcaagcagaggctgaagctgaaggacggcggccactacgacgctgaggtcaagaccacctacaaggccaagaagcccgtgcagctgcccggcgcctacaacgtcaacatcaagttggacatcacctcccacaacgaggactacaccatcgtggaacagtacgaacgcgccgagggccgccactccaccggcggcatggacgagctgtacaagtaagcggccgcgactctagagtcgacctgcaggcatgcaagcttgatatcaagcttatcgataatcaacctctggattacaaaatttgtgaaagattgactggtattcttaactatgttgctccttttacgctatgtggatacgctgctttaatgcctttgtatcatgctattgcttcccgtatggctttcattttctcctccttgtataaatcctggttgctgtctctttatgaggagttgtggcccgttgtcaggcaacgtggcgtggtgtgcactgtgtttgctgacgcaacccccactggttggggcattgccaccacctgtcagctcctttccgggactttcgctttccccctccctattgccacggcggaactcatcgccgcctgccttgcccgctgctggacaggggctcggctgttgggcactgacaattccgtggtgttgtcggggaaatcatcgtcctttccttggctgctcgcctgtgttgccacctggattctgcgcgggacgtccttctgctacgtcccttcggccctcaatccagcggaccttccttcccgcggcctgctgccggctctgcggcctcttccgcgtcttcgccttcgccctcagacgagtcggatctccctttgggccgcctccccgcat

SEQ ID NO: 255 - DNA, 13017 bp, Artificial Sequence
  synthetic vector
cgataccgtcgacctcgagggaattaattcgagctcggtacctttaagaccaatgacttacaaggcagctgtagatcttagccactttttaaaagaaaaggggggactggaagggctaattcactcccaacgaagacaagatctgctttttgcttgtactgggtctctctggttagaccagatctgagcctgggagctctctggctaactagggaacccactgcttaagcctcaataaagcttgccttgagtgcttcaagtagtgtgtgcccgtctgttgtgtgactctggtaactagagatccctcagacccttttagtcagtgtggaaaatctctagcagcatctagaattaattccgtgtattctatagtgtcacctaaatcgtatgtgtatgatacataaggttatgtattaattgtagccgcgttctaacgacaatatgtacaagcctaattgtgtagcatctggcttactgaagcagaccctatcatctctctcgtaaactgccgtcagagtcggtttggttggacgaaccttctgagtttctggtaacgccgtcccgcacccggaaatggtcagcgaaccaatcagcagggtcatcgctagccagatcctctacgccggacgcatcgtggccggcatcaccggcgccacaggtgcggttgctggcgcctatatcgccgacatcaccgatggggaagatcgggctcgccacttcgggctcatgagcgcttgtttcggcgtgggtatggtggcaggccccgtggccgggggactgttgggcgccatctccttgcatgcaccattccttgcggcggcggtgctcaacggcctcaacctactactgggctgcttcctaatgcaggagtcgcataagggagagcgtcgaatggtgcactctcagtacaatctgctctgatgccgcatagttaagccagccccgacacccgccaacacccgctgacgcgccctgacgggcttgtctgctcccggcatccgcttacagacaagctgtgaccgtctccgggagctgcatgtgtcagaggttttcaccgtcatcaccgaaacgcgcgagacgaaagggcctcgtgatacgcctatttttataggttaatgtcatgataataatggtttcttagacgtcaggtggcacttttcggggaaatgtgcgcggaacccctatttgtttatttttctaaatacattcaaatatgtatccgctcatgagacaataaccctgataaatgcttcaataatattgaaaaaggaagagtatgagtattcaacatttccgtgtcgcccttattcccttttttgcggcattttgccttcctgtttttgctcacccagaaacgctggtgaaagtaaaagatgctgaagatcagttgggtgcacgagtgggttacatcgaactggatctcaacagcggtaagatccttgagagttttcgccccgaagaacgttttccaatgatgagcacttttaaagttctgctatgtggcgcggtattatcccgtattgacgccgggcaagagcaactcggtcgccgcatacactattctcagaatgacttggttgagtactcaccagtcacagaaaagcatcttacggatggcatgacagtaagagaattatgcagtgctgccataaccatgagtgataacactgcggccaacttacttctgacaacgatcggaggaccgaaggagctaaccgcttttttgcacaacatgggggatcatgtaactcgccttgatcgttgggaaccggagctgaatgaagccataccaaacgacgagcgtgacaccacgatgcctgtagcaatggcaacaacgttgcgcaaactattaactggcgaactacttactctagcttcccggcaacaattaatagactggatggaggcggataaagttgcaggaccacttctgcgctcggcccttccggctggctggtttattgctgataaatctggagccggtgagcgtgggtctcgcggtatcattgcagcactggggccagatggtaagccctcccgtatcgtagttatctacacgacggggagtcaggcaactatggatgaacgaaatagacagatcgctgagataggtgcctcactgattaagcattggtaactgtcagaccaagtttactcatatatactttagattgatttaaaacttcatttttaatttaaaaggatctaggtgaagatcctttttgataatctcatgaccaaaatcccttaacgtgagttttcgttccactgagcgtcagaccccgtagaaaagatcaaaggatcttcttgagatcctttttttctgcgcgtaatctgctgcttgcaaacaaaaaaaccaccgctaccagcggtggtttgtttgccggatcaagagctaccaactctttttccgaaggtaactggcttcagcagagcgcagataccaaatactgtctttctagtgtagccgtagttaggccaccacttcaagaactctgtagcaccgcctacatacctcgctctgctaatcctgttaccagtggctgctgccagtggcgataagtcgtgtcttaccgggttggactcaagacgatagttaccggataaggcgcagcggtcgggctgaacggggggttcgtgcacacagcccagcttggagcgaacgacctacaccgaactgagatacctacagcgtgagctatgagaaagcgccacgcttcccgaagggagaaaggcggacaggtatccggtaagcggcagggtcggaacaggagagcgcacgagggagcttccagggggaaacgcctggtatctttatagtcctgtcgggtttcgccacctctgacttgagcgtcgatttttgtgatgctcgtcaggggggcggagcctatggaaaaacgccagcaacgcggcctttttacggttcctggccttttgctggccttttgctcacatgttctttcctgcgttatcccctgattctgtggataaccgtattaccgcctttgagtgagctgataccgctcgccgcagccgaacgaccgagcgcagcgagtcagtgagcgaggaagcggaagagcgcccaatacgcaaaccgcctctccccgcgcgttggccgattcattaatgcagctgtggaatgtgtgtcagttagggtgtggaaagtccccaggctccccagcaggcagaagtatgcaaagcatgcatctcaattagtcagcaaccaggtgtggaaagtccccaggctccccagcaggcagaagtatgcaaagcatgcatctcaattagtcagcaaccatagtcccgcccctaactccgcccatcccgcccctaactccgcccagttccgcccattctccgccccatggctgactaattttttttatttatgcagaggccgaggccgcctcggcctctgagctattccagaagtagtgaggaggcttttttggaggcctaggcttttgcaaaaagcttggacacaagacaggcttgcgagatatgtttgagaataccactttatcccgcgtcagggagaggcagtgcgtaaaaagacgcggactcatgtgaaatactggtttttagtgcgccagatctctataatctcgcgcaacctattttcccctcgaacactttttaagccgtagataaacaggctgggacacttcacatgagcgaaaaatacatcgtcacctgggacatgttgcagatccatgcacgtaaactcgcaagccgactgatgccttctgaacaatggaaaggcattattgccgtaagccgtggcggtctgtaccgggtgcgttactggcgcgtgaactgggtattcgtcatgtcgataccgtttgtatttccagctacgatcacgacaaccagcgcgagcttaaagtgctgaaacgcgcagaaggcgatggcgaaggcttcatcgttattgatgacctggtggataccggtggtactgcggttgcgattcgtgaaatgtatccaaaagcgcactttgtcaccatcttcgcaaaaccggctggtcgtccgctggttgatgactatgttgttgatatcccgcaagatacctggattgaacagccgtgggatatgggcgtcgtattcgtcccgccaatctccggtcgctaatcttttcaacgcctggcactgccgggcgttgttctttttaacttcaggcgggttacaatagtttccagtaagtattctggaggctgcatccatgacacaggcaaacctgagcgaaaccctgttcaaaccccgctttaaacatcctgaaacctcgacgctagtccgccgctttaatcacggcgcacaaccgcctgtgcagtcggcccttgatggtaaaaccatccctcactggtatcgcatgattaaccgtctgatgtggatctggcgcggcattgacccacgcgaaatcctcgacgtccaggcacgtattgtgatgagcgatgccgaacgtaccgacgatgatttatacgatacggtgattggctaccgtggcggcaactggatttatgagtgggccccggatctttgtgaaggaaccttacttctgtggtgtgacataattggacaaactacctacagagatttaaagctctaaggtaaatataaaatttttaagtgtataatgtgttaaactactgattctaattgtttgtgtattttagattccaacctatggaactgatgaatgggagcagtggtggaatgcctttaatgaggaaaacctgttttgctcagaagaaatgccatctagtgatgatgaggctactgctgactctcaacattctactcctccaaaaaagaagagaaaggtagaagaccccaaggactttccttcagaattgctaagttttttgagtcatgctgtgtttagtaatagaactcttgcttgctttgctatttacaccacaaaggaaaaagctgcactgctatacaagaaaattatggaaaaatattctgtaacctttataagtaggcataacagttataatcataacatactgttttttcttactccacacaggcatagagtgtctgctattaataactatgctcaaaaattgtgtacctttagctttttaatttgtaaaggggttaataaggaatatttgatgtatagtgccttgactagagatcataatcagccataccacatttgtagaggttttacttgctttaaaaaacctcccacacctccccctgaacctgaaacataaaatgaatgcaattgttgttgttaacttgtttattgcagcttataatggttacaaataaagcaatagcatcacaaatttcacaaataaagcatttttttcactgcattctagttgtggtttgtccaaactcatcaatgtatcttatcatgtctggatcaactggataactcaagctaaccaaaatcatcccaaacttcccaccccataccctattaccactgccaattacctagtggtttcatttactctaaacctgtgattcctctgaattattttcattttaaagaaattgtatttgttaaatatgtactacaaacttagtagttggaagggctaattcactcccaaagaagacaagatatccttgatctgtggatctaccacacacaaggctacttccctgattagcagaactacacaccagggccaggggtcagatatccactgacctttggatggtgctacaagctagtaccagttgagccagataaggtagaagaggccaataaaggagagaacaccagcttgttacaccctgtgagcctgcatgggatggatgacccggagagagaagtgttagagtggaggtttgacagccgcctagcatttcatcacgtggcccgagagctgcatccggagtacttcaagaactgctgatatcgagcttgctacaagggactttccgctggggactttccagggaggcgtggcctgggcgggactggggagtggcgagccctcagatcctgcatataagcagctgctttttgcctgtactgggtctctctggttagaccagatctgagcctgggagctctctggctaactagggaacccactgcttaagcctcaataaagcttgccttgagtgcttcaagtagtgtgtgcccgtctgttgtgtgactctggtaactagagatccctcagacccttttagtcagtgtggaaaatctctagcagtggcgcccgaacagggacttgaaagcgaaagggaaaccagaggagctctctcgacgcaggactcggcttgctgaagcgcgcacggcaagaggcgaggggcggcgactggtgagtacgccaaaaattttgactagcggaggctagaaggagagagatgggtgcgagagcgtcagtattaagcgggggagaattagatcgcgatgggaaaaaattcggttaaggccagggggaaagaaaaaatataaattaaaacatatagtatgggcaagcagggagctagaacgattcgcagttaatcctggcctgttagaaacatcagaaggctgtagacaaatactgggacagctacaaccatcccttcagacaggatcagaagaacttagatcattatataatacagtagcaaccctctattgtgtgcatcaaaggatagagataaaagacaccaaggaagctttagacaagatagaggaagagcaaaacaaaagtaagaccaccgcacagcaagcggccggccgctgatcttcagacctggaggaggagatatgagggacaattggagaagtgaattatataaatataaagtagtaaaaattgaaccattaggagtagcacccaccaaggcaaagagaagagtggtgcagagagaaaaaagagcagtgggaataggagctttgttccttgggttcttgggagcagcaggaagcactatgggcgcagcgtcaatgacgctgacggtacaggccagacaattattgtctggtatagtgcagcagcagaacaatttgctgagggctattgaggcgcaacagcatctgttgcaactcacagtctggggcatcaagcagctccaggcaagaatcctggctgtgaaagatacctaaaggatcaacagctcctggggatttggggttgctctggaaaactcatttgcaccactgctgtgccttggaatgctagttggagtaataaatctctggaacagatttggaatcacacgacctggatggagtgggacagagaaattaacaattacacaagcttaatacactccttaattgaagaatcgcaaaaccagcaagaaaagaatgaacaagaattattggaattagataaatgggcaagtttgtggaattggtttaacataacaaattggctgtggtatataaaattattcataatgatagtaggaggcttggtaggtttaagaatagtttttgctgtactttctatagtgaatagagttaggcagggatattcaccattatcgtttcagacccacctcccaaccccgaggggacccgacaggcccgaaggaatagaagaagaaggtggagagagagacagagacagatccattcgattagtgaacggatctcgacggtatcgccaaatggcagtattcatccacaattttaaaagaaaaggggggattggggggtacagtgcaggggaaagaatagtagacataatagcaacagacatacaaactaaagaattacaaaaacaaattacaaaaattcaaaattttcgggtttattacagggacagcagagatccagtttggatcgataagcttgatatcgaattcctgcagcccgtgaggctccggtgcccgtcagtgggcagagcgcacatcgcccacagtccccgagaagttggggggaggggtcggcaattgaaccggtgcctagagaaggtggcgcggggtaaactgggaaagtgatgtcgtgtactggctccgcctttttcccgagggtgggggagaaccgtatataagtgcagtagtcgccgtgaacgttctttttcgcaacgggtttgccgccagaacacaggtaagtgccgtgtgtggttcccgcgggcctggcctctttacgggttatggcccttgcgtgccttgaattacttccacctggctgcagtacgtgattcttgatcccgagcttcgggttggaagtgggtgggagagttcgaggccttgcgcttaaggagccccttcgcctcgtgcttgagttgaggcctggcctgggcgctggggccgccgcgtgcgaatctggtggcaccttcgcgcctgtctcgctgctttcgataagtctctagccatttaaaatttttgatgacctgctgcgacgctttttttctggcaagatagtcttgtaaatgcgggccaagatctgcacactggtatttcggtttttggggccgcgggcggcgacggggcccgtgcgtcccagcgcacatgttcggcgaggcggggcctgcgagcgcggccaccgagaatcggacgggggtagtctcaagctggccggcctgctctggtgcctggcctcgcgccgccgtgtatcgccccgccctgggcggcaaggctggcccggtcggcaccagttgcgtgagcggaaagatggccgcttcccggccctgctgcagggagctcaaaatggaggacgcggcgctcgggagagcgggcgggtgagtcacccacacaaaggaaaagggcctttccgtcctcagccgtcgcttcatgtgactccacggagtaccgggcgccgtccaggcacctcgattagttctcgagcttttggagtacgtcgtctttaggttggggggaggggttttatgcgatggagtttccccacactgagtgggtggagactgaagttaggccagcttggcacttgatgtaattctccttggaatttgccctttttgagtttggatcttggttcattctcaagcctcagacagtggttcaaagtttttttcttccatttcaggtgtcgtgaggggatctggagctctcgagaattctcacgcgtgccgccaccatggccttaccagtgaccgccttgctcctgccgctggccttgctgctccacgccgccaggccggacatccagatgacacagactacatcctccctgtctgcctctctgggagacagagtcaccatcagttgcagggcaagtcaggacattagtaaatatttaaattggtatcagcagaaaccagatggaactgttaaactcctgatctaccatacatcaagattacactcaggagtcccatcaaggttcagtggcagtgggtctggaacagattattctctcaccattagcaacctggagcaagaagatattgccacttacttttgccaacagggtaatacgcttccgtacacgttcggaggcggcaccaagctggagatcacaggtggcggtggctcgggcggtggtgggtcgggtggcggcggatctgaggtgaaactgcaggagtcaggacctggcctggtggcgccctcacagagcctgtccgtcacatgcactgtctcaggggtctcattacccgactatggtgtaagctggattcgccagcctccacgaaagggtctggagtggctgggagtaatatggggtagtgaaaccacatactataattcagctctcaaatccagactgaccatcatcaaggacaactccaagagccaagttttcttaaaaatgaacagtctgcaaactgatgacacagccatttactactgtgccaaacattattactacggtggtagctatgctatggactactggggccaaggaacctcagtcaccgtctcctcagggaagcctatcccgaaccctctgttgggtctcgatagtaccaatggggccgcaaccacgacgccagcgccgcgaccaccaacaccggcgcccaccatcgcgttgcagcccctgtccctgcgcccagaggcgtgccggccagcggcggggggcgcagtgcacacgagggggctggacttcgcctgtgatttttgggtgctggtggtggttggtggagtcctggcttgctatagcttgctagtaacagtggcctttattattttctgggtgaggagtaagaggagcaggctcctgcacagtgactacatgaacatgactccccgccgccccgggcccacccgcaagcattaccagccctatgccccaccacgcgacttcgcagcctatcgctccgggggtaccgaattcagcgggtcaggcggatctggaagtggtggtggagaacttgatgaattggtatacttactagatgggccaggttatgaccctatacattgcgatgtagtgacaaggggcggcagccaccttttcaattttggaagcggagctactaacttcagcctgctgaagcaggctggagacgtggaggagaaccctggacctatgattcatcttggtcacatcctcttcttgctgctgttgccagttgctgccgcacaaacaaccccaggtgagaggtcaagtcttcccgccttctatccgggcacaagcgggagttgtagtgggtgtggatctttgtcccttcctatatacatctgggctcctctggctggcacttgcggagtgcttctgctgagtctggttattaccaaacggggcagaaagaaactcctgtatatattcaaacaaccatttatgagaccagtacaaactactcaagaggaagatggctgtagctgccgatttccagaagaagaagaaggaggatgtgaactgagagtgaagttcagcaggagcgcagacgcccccgcgtacaagcagggccagaaccagctctataacgagctcaatctaggacgaagagaggagtacgatgttttggacaagagacgtggccgggaccctgagatggggggaaagccgagaaggaagaaccctcaggaaggcctgtacaatgaactgcagaaagataagatggcggaggcctacagtgagattgggatgaaaggcgagcgccggaggggcaaggggcacgatggcctttaccagggtctcagtacagccaccaaggacacctacgacgcccttcacatgcaggccctgccccctcgcggttctgttgttattgttggtagaattattttatctggtagtggtagtatcacggcctactcccaacagacgcggggcctacttggttgcatcatcactagcctcacaggccgggacaagaaccaggtcgaaggggaggttcaagtggtttctaccgcaacacaatctttcctggcgacctgcgtcaacggcgtgtgctggactgtctaccatggcgctggctcgaagaccctagccggtccaaaaggtccaatcacccaaatgtacaccaatgtagaccaggacctcgtcggctggcaggcgcctccaggggcgcgctccttgacaccatgcacctgtggcagctcggacctttacttggtcacgagacatgctgatgtcattccggtgcgccggcgaggcgacagcaggggaagtctactctcccccaggcccgtctcctacctgaaaggctccgcaggtggtccattgctttgcccttcggggcacgctgtgggcatcttccgggctgctgtgtgcacccggggggtcgcgaaggcggtggacttcgtgcccgttgagtctatggaaactaccatgcggtctggcatggtgagcaagggcgaggaggataacatggccatcatcaaggagttcatgcgcttcaaggtgcacatggagggctccgtgaacggccacgagttcgagatcgagggcgagggcgagggccgcccctacgagggcacccagaccgccaagctgaaggtgaccaagggtggccccctgcccttcgcctgggacatcctgtcccctcagttcatgtacggctccaaggcctacgtgaagcaccccgccgacatccccgactacttgaagctgtccttccccgagggcttcaagtgggagcgcgtgatgaacttcgaggacggcggcgtggtgaccgtgacccaggactcctccctgcaggacggcgagttcatctacaaggtgaagctgcgcggcaccaacttcccctccgacggccccgtaatgcagaagaagaccatgggctgggaggcctcctccgagcggatgtaccccgaggacggcgccctgaagggcgagatcaagcagaggctgaagctgaaggacggcggccactacgacgctgaggtcaagaccacctacaaggccaagaagcccgtgcagctgcccggcgcctacaacgtcaacatcaagttggacatcacctcccacaacgaggactacaccatcgtggaacagtacgaacgcgccgagggccgccactccaccggcggcatggacgagctgtacaagtaagcggccgcgactctagagtcgacctgcaggcatgcaagcttgatatcaagcttatcgataatcaacctctggattacaaaatttgtgaaagattgactggtattcttaactatgttgctccttttacgctatgtggatacgctgctttaatgcctttgtatcatgctattgcttcccgtatggctttcattttctcctccttgtataaatcctggttgctgtctctttatgaggagttgtggcccgttgtcaggcaacgtggcgtggtgtgcactgtgtttgctgacgcaacccccactggttggggcattgccaccacctgtcagctcctttccgggactttcgctttccccctccctattgccacggcggaactcatcgccgcctgccttgcccgctgctggacaggggctcggctgttgggcactgacaattccgtggtgttgtcggggaaatcatcgtcctttccttggctgctcgcctgtgttgccacctggattctgcgcgggacgtccttctgctacgtcccttcggccctcaatccagcggaccttccttcccgcggcctgctgccggctctgcggcctcttccgcgtcttcgccttcgccctcagacgagtcggatctccctttgggccgcctccccgcat

SEQ ID NO: 256 - DNA, 12891 bp, Artificial Sequence
  synthetic vector
cgataccgtcgacctcgagggaattaattcgagctcggtacctttaagaccaatgacttacaaggcagctgtagatcttagccactttttaaaagaaaaggggggactggaagggctaattcactcccaacgaagacaagatctgctttttgcttgtactgggtctctctggttagaccagatctgagcctgggagctctctggctaactagggaacccactgcttaagcctcaataaagcttgccttgagtgcttcaagtagtgtgtgcccgtctgttgtgtgactctggtaactagagatccctcagacccttttagtcagtgtggaaaatctctagcagcatctagaattaattccgtgtattctatagtgtcacctaaatcgtatgtgtatgatacataaggttatgtattaattgtagccgcgttctaacgacaatatgtacaagcctaattgtgtagcatctggcttactgaagcagaccctatcatctctctcgtaaactgccgtcagagtcggtttggttggacgaaccttctgagtttctggtaacgccgtcccgcacccggaaatggtcagcgaaccaatcagcagggtcatcgctagccagatcctctacgccggacgcatcgtggccggcatcaccggcgccacaggtgcggttgctggcgcctatatcgccgacatcaccgatggggaagatcgggctcgccacttcgggctcatgagcgcttgtttcggcgtgggtatggtggcaggccccgtggccgggggactgttgggcgccatctccttgcatgcaccattccttgcggcggcggtgctcaacggcctcaacctactactgggctgcttcctaatgcaggagtcgcataagggagagcgtcgaatggtgcactctcagtacaatctgctctgatgccgcatagttaagccagccccgacacccgccaacacccgctgacgcgccctgacgggcttgtctgctcccggcatccgcttacagacaagctgtgaccgtctccgggagctgcatgtgtcagaggttttcaccgtcatcaccgaaacgcgcgagacgaaagggcctcgtgatacgcctatttttataggttaatgtcatgataataatggtttcttagacgtcaggtggcacttttcggggaaatgtgcgcggaacccctatttgtttatttttctaaatacattcaaatatgtatccgctcatgagacaataaccctgataaatgcttcaataatattgaaaaaggaagagtatgagtattcaacatttccgtgtcgcccttattcccttttttgcggcattttgccttcctgtttttgctcacccagaaacgctggtgaaagtaaaagatgctgaagatcagttgggtgcacgagtgggttacatcgaactggatctcaacagcggtaagatccttgagagttttcgccccgaagaacgttttccaatgatgagcacttttaaagttctgctatgtggcgcggtattatcccgtattgacgccgggcaagagcaactcggtcgccgcatacactattctcagaatgacttggttgagtactcaccagtcacagaaaagcatcttacggatggcatgacagtaagagaattatgcagtgctgccataaccatgagtgataacactgcggccaacttacttctgacaacgatcggaggaccgaaggagctaaccgcttttttgcacaacatgggggatcatgtaactcgccttgatcgttgggaaccggagctgaatgaagccataccaaacgacgagcgtgacaccacgatgcctgtagcaatggcaacaacgttgcgcaaactattaactggcgaactacttactctagcttcccggcaacaattaatagactggatggaggcggataaagttgcaggaccacttctgcgctcggcccttccggctggctggtttattgctgataaatctggagccggtgagcgtgggtctcgcggtatcattgcagcactggggccagatggtaagccctcccgtatcgtagttatctacacgacggggagtcaggcaactatggatgaacgaaatagacagatcgctgagataggtgcctcactgattaagcattggtaactgtcagaccaagtttactcatatatactttagattgatttaaaacttcatttttaatttaaaaggatctaggtgaagatcctttttgataatctcatgaccaaaatcccttaacgtgagttttcgttccactgagcgtcagaccccgtagaaaagatcaaaggatcttcttgagatcctttttttctgcgcgtaatctgctgcttgcaaacaaaaaaaccaccgctaccagcggtggtttgtttgccggatcaagagctaccaactctttttccgaaggtaactggcttcagcagagcgcagataccaaatactgtctttctagtgtagccgtagttaggccaccacttcaagaactctgtagcaccgcctacatacctcgctctgctaatcctgttaccagtggctgctgccagtggcgataagtcgtgtcttaccgggttggactcaagacgatagttaccggataaggcgcagcggtcgggctgaacggggggttcgtgcacacagcccagcttggagcgaacgacctacaccgaactgagatacctacagcgtgagctatgagaaagcgccacgcttcccgaagggagaaaggcggacaggtatccggtaagcggcagggtcggaacaggagagcgcacgagggagcttccagggggaaacgcctggtatctttatagtcctgtcgggtttcgccacctctgacttgagcgtcgatttttgtgatgctcgtcaggggggcggagcctatggaaaaacgccagcaacgcggcctttttacggttcctggccttttgctggccttttgctcacatgttctttcctgcgttatcccctgattctgtggataaccgtattaccgcctttgagtgagctgataccgctcgccgcagccgaacgaccgagcgcagcgagtcagtgagcgaggaagcggaagagcgcccaatacgcaaaccgcctctccccgcgcgttggccgattcattaatgcagctgtggaatgtgtgtcagttagggtgtggaaagtccccaggctccccagcaggcagaagtatgcaaagcatgcatctcaattagtcagcaaccaggtgtggaaagtccccaggctccccagcaggcagaagtatgcaaagcatgcatctcaattagtcagcaaccatagtcccgcccctaactccgcccatcccgcccctaactccgcccagttccgcccattctccgccccatggctgactaattttttttatttatgcagaggccgaggccgcctcggcctctgagctattccagaagtagtgaggaggcttttttggaggcctaggcttttgcaaaaagcttggacacaagacaggcttgcgagatatgtttgagaataccactttatcccgcgtcagggagaggcagtgcgtaaaaagacgcggactcatgtgaaatactggtttttagtgcgccagatctctataatctcgcgcaacctattttcccctcgaacactttttaagccgtagataaacaggctgggacacttcacatgagcgaaaaatacatcgtcacctgggacatgttgcagatccatgcacgtaaactcgcaagccgactgatgccttctgaacaatggaaaggcattattgccgtaagccgtggcggtctgtaccgggtgcgttactggcgcgtgaactgggtattcgtcatgtcgataccgtttgtatttccagctacgatcacgacaaccagcgcgagcttaaagtgctgaaacgcgcagaaggcgatggcgaaggcttcatcgttattgatgacctggtggataccggtggtactgcggttgcgattcgtgaaatgtatccaaaagcgcactttgtcaccatcttcgcaaaaccggctggtcgtccgctggttgatgactatgttgttgatatcccgcaagatacctggattgaacagccgtgggatatgggcgtcgtattcgtcccgccaatctccggtcgctaatcttttcaacgcctggcactgccgggcgttgttctttttaacttcaggcgggttacaatagtttccagtaagtattctggaggctgcatccatgacacaggcaaacctgagcgaaaccctgttcaaaccccgctttaaacatcctgaaacctcgacgctagtccgccgctttaatcacggcgcacaaccgcctgtgcagtcggcccttgatggtaaaaccatccctcactggtatcgcatgattaaccgtctgatgtggatctggcgcggcattgacccacgcgaaatcctcgacgtccaggcacgtattgtgatgagcgatgccgaacgtaccgacgatgatttatacgatacggtgattggctaccgtggcggcaactggatttatgagtgggccccggatctttgtgaaggaaccttacttctgtggtgtgacataattggacaaactacctacagagatttaaagctctaaggtaaatataaaatttttaagtgtataatgtgttaaactactgattctaattgtttgtgtattttagattccaacctatggaactgatgaatgggagcagtggtggaatgcctttaatgaggaaaacctgttttgctcagaagaaatgccatctagtgatgatgaggctactgctgactctcaacattctactcctccaaaaaagaagagaaaggtagaagaccccaaggactttccttcagaattgctaagttttttgagtcatgctgtgtttagtaatagaactcttgcttgctttgctatttacaccacaaaggaaaaagctgcactgctatacaagaaaattatggaaaaatattctgtaacctttataagtaggcataacagttataatcataacatactgttttttcttactccacacaggcatagagtgtctgctattaataactatgctcaaaaattgtgtacctttagctttttaatttgtaaaggggttaataaggaatatttgatgtatagtgccttgactagagatcataatcagccataccacatttgtagaggttttacttgctttaaaaaacctcccacacctccccctgaacctgaaacataaaatgaatgcaattgttgttgttaacttgtttattgcagcttataatggttacaaataaagcaatagcatcacaaatttcacaaataaagcatttttttcactgcattctagttgtggtttgtccaaactcatcaatgtatcttatcatgtctggatcaactggataactcaagctaaccaaaatcatcccaaacttcccaccccataccctattaccactgccaattacctagtggtttcatttactctaaacctgtgattcctctgaattattttcattttaaagaaattgtatttgttaaatatgtactacaaacttagtagttggaagggctaattcactcccaaagaagacaagatatccttgatctgtggatctaccacacacaaggctacttccctgattagcagaactacacaccagggccaggggtcagatatccactgacctttggatggtgctacaagctagtaccagttgagccagataaggtagaagaggccaataaaggagagaacaccagcttgttacaccctgtgagcctgcatgggatggatgacccggagagagaagtgttagagtggaggtttgacagccgcctagcatttcatcacgtggcccgagagctgcatccggagtacttcaagaactgctgatatcgagcttgctacaagggactttccgctggggactttccagggaggcgtggcctgggcgggactggggagtggcgagccctcagatcctgcatataagcagctgctttttgcctgtactgggtctctctggttagaccagatctgagcctgggagctctctggctaactagggaacccactgcttaagcctcaataaagcttgccttgagtgcttcaagtagtgtgtgcccgtctgttgtgtgactctggtaactagagatccctcagacccttttagtcagtgtggaaaatctctagcagtggcgcccgaacagggacttgaaagcgaaagggaaaccagaggagctctctcgacgcaggactcggcttgctgaagcgcgcacggcaagaggcgaggggcggcgactggtgagtacgccaaaaattttgactagcggaggctagaaggagagagatgggtgcgagagcgtcagtattaagcgggggagaattagatcgcgatgggaaaaaattcggttaaggccagggggaaagaaaaaatataaattaaaacatatagtatgggcaagcagggagctagaacgattcgcagttaatcctggcctgttagaaacatcagaaggctgtagacaaatactgggacagctacaaccatcccttcagacaggatcagaagaacttagatcattatataatacagtagcaaccctctattgtgtgcatcaaaggatagagataaaagacaccaaggaagctttagacaagatagaggaagagcaaaacaaaagtaagaccaccgcacagcaagcggccggccgctgatcttcagacctggaggaggagatatgagggacaattggagaagtgaattatataaatataaagtagtaaaaattgaaccattaggagtagcacccaccaaggcaaagagaagagtggtgcagagagaaaaaagagcagtgggaataggagctttgttccttgggttcttgggagcagcaggaagcactatgggcgcagcgtcaatgacgctgacggtacaggccagacaattattgtctggtatagtgcagcagcagaacaatttgctgagggctattgaggcgcaacagcatctgttgcaactcacagtctggggcatcaagcagctccaggcaagaatcctggctgtgaaagatacctaaaggatcaacagctcctggggatttggggttgctctggaaaactcatttgcaccactgctgtgccttggaatgctagttggagtaataaatctctggaacagatttggaatcacacgacctggatggagtgggacagagaaattaacaattacacaagcttaatacactccttaattgaagaatcgcaaaaccagcaagaaaagaatgaacaagaattattggaattagataaatgggcaagtttgtggaattggtttaacataacaaattggctgtggtatataaaattattcataatgatagtaggaggcttggtaggtttaagaatagtttttgctgtactttctatagtgaatagagttaggcagggatattcaccattatcgtttcagacccacctcccaaccccgaggggacccgacaggcccgaaggaatagaagaagaaggtggagagagagacagagacagatccattcgattagtgaacggatctcgacggtatcgccaaatggcagtattcatccacaattttaaaagaaaaggggggattggggggtacagtgcaggggaaagaatagtagacataatagcaacagacatacaaactaaagaattacaaaaacaaattacaaaaattcaaaattttcgggtttattacagggacagcagagatccagtttggatcgataagcttgatatcgaattcctgcagcccgtgaggctccggtgcccgtcagtgggcagagcgcacatcgcccacagtccccgagaagttggggggaggggtcggcaattgaaccggtgcctagagaaggtggcgcggggtaaactgggaaagtgatgtcgtgtactggctccgcctttttcccgagggtgggggagaaccgtatataagtgcagtagtcgccgtgaacgttctttttcgcaacgggtttgccgccagaacacaggtaagtgccgtgtgtggttcccgcgggcctggcctctttacgggttatggcccttgcgtgccttgaattacttccacctggctgcagtacgtgattcttgatcccgagcttcgggttggaagtgggtgggagagttcgaggccttgcgcttaaggagccccttcgcctcgtgcttgagttgaggcctggcctgggcgctggggccgccgcgtgcgaatctggtggcaccttcgcgcctgtctcgctgctttcgataagtctctagccatttaaaatttttgatgacctgctgcgacgctttttttctggcaagatagtcttgtaaatgcgggccaagatctgcacactggtatttcggtttttggggccgcgggcggcgacggggcccgtgcgtcccagcgcacatgttcggcgaggcggggcctgcgagcgcggccaccgagaatcggacgggggtagtctcaagctggccggcctgctctggtgcctggcctcgcgccgccgtgtatcgccccgccctgggcggcaaggctggcccggtcggcaccagttgcgtgagcggaaagatggccgcttcccggccctgctgcagggagctcaaaatggaggacgcggcgctcgggagagcgggcgggtgagtcacccacacaaaggaaaagggcctttccgtcctcagccgtcgcttcatgtgactccacggagtaccgggcgccgtccaggcacctcgattagttctcgagcttttggagtacgtcgtctttaggttggggggaggggttttatgcgatggagtttccccacactgagtgggtggagactgaagttaggccagcttggcacttgatgtaattctccttggaatttgccctttttgagtttggatcttggttcattctcaagcctcagacagtggttcaaagtttttttcttccatttcaggtgtcgtgaggggatctggagctctcgagaattctcacgcgtgccgccaccatggccttaccagtgaccgccttgctcctgccgctggccttgctgctccacgccgccaggccggacatccagatgacacagactacatcctccctgtctgcctctctgggagacagagtcaccatcagttgcagggcaagtcaggacattagtaaatatttaaattggtatcagcagaaaccagatggaactgttaaactcctgatctaccatacatcaagattacactcaggagtcccatcaaggttcagtggcagtgggtctggaacagattattctctcaccattagcaacctggagcaagaagatattgccacttacttttgccaacagggtaatacgcttccgtacacgttcggaggcggcaccaagctggagatcacaggtggcggtggctcgggcggtggtgggtcgggtggcggcggatctgaggtgaaactgcaggagtcaggacctggcctggtggcgccctcacagagcctgtccgtcacatgcactgtctcaggggtctcattacccgactatggtgtaagctggattcgccagcctccacgaaagggtctggagtggctgggagtaatatggggtagtgaaaccacatactataattcagctctcaaatccagactgaccatcatcaaggacaactccaagagccaagttttcttaaaaatgaacagtctgcaaactgatgacacagccatttactactgtgccaaacattattactacggtggtagctatgctatggactactggggccaaggaacctcagtcaccgtctcctcagggaagcctatcccgaaccctctgttgggtctcgatagtaccaatggggccgcaaccacgacgccagcgccgcgaccaccaacaccggcgcccaccatcgcgttgcagcccctgtccctgcgcccagaggcgtgccggccagcggcggggggcgcagtgcacacgagggggctggacttcgcctgtgatttttgggtgctggtggtggttggtggagtcctggcttgctatagcttgctagtaacagtggcctttattattttctgggtgaggagtaagaggagcaggctcctgcacagtgactacatgaacatgactccccgccgccccgggcccacccgcaagcattaccagccctatgccccaccacgcgacttcgcagcctatcgctccgggggtaccgaattcagcgggtcaggcggatctggaagtggtggtggagaacttgatgaattggtatacttactagatgggccaggttatgaccctatacattgcgatgtagtgacaaggggcggcagccaccttttcaattttggaagcggagctactaacttcagcctgctgaagcaggctggagacgtggaggagaaccctggacctatgattcatcttggtcacatcctcttcttgctgctgttgccagttgctgccgcacaaacaaccccaggtgagaggtcaagtcttcccgccttctatccgggcacaagcgggagttgtagtgggtgtggatctttgtcccttcctatatacatctgggctcctctggctggcacttgcggagtgcttctgctgagtctggttattaccggttctgttgttattgttggtagaattattttatctggtagtggtagtatcacggcctactcccaacagacgcggggcctacttggttgcatcatcactagcctcacaggccgggacaagaaccaggtcgaaggggaggttcaagtggtttctaccgcaacacaatctttcctggcgacctgcgtcaacggcgtgtgctggactgtctaccatggcgctggctcgaagaccctagccggtccaaaaggtccaatcacccaaatgtacaccaatgtagaccaggacctcgtcggctggcaggcgcctccaggggcgcgctccttgacaccatgcacctgtggcagctcggacctttacttggtcacgagacatgctgatgtcattccggtgcgccggcgaggcgacagcaggggaagtctactctcccccaggcccgtctcctacctgaaaggctccgcaggtggtccattgctttgcccttcggggcacgctgtgggcatcttccgggctgctgtgtgcacccggggggtcgcgaaggcggtggacttcgtgcccgttgagtctatggaaactaccatgcggtctagagtgaagttcagcaggagcgcagacgcccccgcgtacaagcagggccagaaccagctctataacgagctcaatctaggacgaagagaggagtacgatgttttggacaagagacgtggccgggaccctgagatggggggaaagccgagaaggaagaaccctcaggaaggcctgtacaatgaactgcagaaagataagatggcggaggcctacagtgagattgggatgaaaggcgagcgccggaggggcaaggggcacgatggcctttaccagggtctcagtacagccaccaaggacacctacgacgcccttcacatgcaggccctgccccctcgcggcatggtgagcaagggcgaggaggataacatggccatcatcaaggagttcatgcgcttcaaggtgcacatggagggctccgtgaacggccacgagttcgagatcgagggcgagggcgagggccgcccctacgagggcacccagaccgccaagctgaaggtgaccaagggtggccccctgcccttcgcctgggacatcctgtcccctcagttcatgtacggctccaaggcctacgtgaagcaccccgccgacatccccgactacttgaagctgtccttccccgagggcttcaagtgggagcgcgtgatgaacttcgaggacggcggcgtggtgaccgtgacccaggactcctccctgcaggacggcgagttcatctacaaggtgaagctgcgcggcaccaacttcccctccgacggccccgtaatgcagaagaagaccatgggctgggaggcctcctccgagcggatgtaccccgaggacggcgccctgaagggcgagatcaagcagaggctgaagctgaaggacggcggccactacgacgctgaggtcaagaccacctacaaggccaagaagcccgtgcagctgcccggcgcctacaacgtcaacatcaagttggacatcacctcccacaacgaggactacaccatcgtggaacagtacgaacgcgccgagggccgccactccaccggcggcatggacgagctgtacaagtaagcggccgcgactctagagtcgacctgcaggcatgcaagcttgatatcaagcttatcgataatcaacctctggattacaaaatttgtgaaagattgactggtattcttaactatgttgctccttttacgctatgtggatacgctgctttaatgcctttgtatcatgctattgcttcccgtatggctttcattttctcctccttgtataaatcctggttgctgtctctttatgaggagttgtggcccgttgtcaggcaacgtggcgtggtgtgcactgtgtttgctgacgcaacccccactggttggggcattgccaccacctgtcagctcctttccgggactttcgctttccccctccctattgccacggcggaactcatcgccgcctgccttgcccgctgctggacaggggctcggctgttgggcactgacaattccgtggtgttgtcggggaaatcatcgtcctttccttggctgctcgcctgtgttgccacctggattctgcgcgggacgtccttctgctacgtcccttcggccctcaatccagcggaccttccttcccgcggcctgctgccggctctgcggcctcttccgcgtcttcgccttcgccctcagacgagtcggatctccctttgggccgcctccccgcat

SEQ ID NO: 257 - DNA, 12891 bp, Artificial Sequence
  synthetic vector
cgataccgtcgacctcgagggaattaattcgagctcggtacctttaagaccaatgacttacaaggcagctgtagatcttagccactttttaaaagaaaaggggggactggaagggctaattcactcccaacgaagacaagatctgctttttgcttgtactgggtctctctggttagaccagatctgagcctgggagctctctggctaactagggaacccactgcttaagcctcaataaagcttgccttgagtgcttcaagtagtgtgtgcccgtctgttgtgtgactctggtaactagagatccctcagacccttttagtcagtgtggaaaatctctagcagcatctagaattaattccgtgtattctatagtgtcacctaaatcgtatgtgtatgatacataaggttatgtattaattgtagccgcgttctaacgacaatatgtacaagcctaattgtgtagcatctggcttactgaagcagaccctatcatctctctcgtaaactgccgtcagagtcggtttggttggacgaaccttctgagtttctggtaacgccgtcccgcacccggaaatggtcagcgaaccaatcagcagggtcatcgctagccagatcctctacgccggacgcatcgtggccggcatcaccggcgccacaggtgcggttgctggcgcctatatcgccgacatcaccgatggggaagatcgggctcgccacttcgggctcatgagcgcttgtttcggcgtgggtatggtggcaggccccgtggccgggggactgttgggcgccatctccttgcatgcaccattccttgcggcggcggtgctcaacggcctcaacctactactgggctgcttcctaatgcaggagtcgcataagggagagcgtcgaatggtgcactctcagtacaatctgctctgatgccgcatagttaagccagccccgacacccgccaacacccgctgacgcgccctgacgggcttgtctgctcccggcatccgcttacagacaagctgtgaccgtctccgggagctgcatgtgtcagaggttttcaccgtcatcaccgaaacgcgcgagacgaaagggcctcgtgatacgcctatttttataggttaatgtcatgataataatggtttcttagacgtcaggtggcacttttcggggaaatgtgcgcggaacccctatttgtttatttttctaaatacattcaaatatgtatccgctcatgagacaataaccctgataaatgcttcaataatattgaaaaaggaagagtatgagtattcaacatttccgtgtcgcccttattcccttttttgcggcattttgccttcctgtttttgctcacccagaaacgctggtgaaagtaaaagatgctgaagatcagttgggtgcacgagtgggttacatcgaactggatctcaacagcggtaagatccttgagagttttcgccccgaagaacgttttccaatgatgagcacttttaaagttctgctatgtggcgcggtattatcccgtattgacgccgggcaagagcaactcggtcgccgcatacactattctcagaatgacttggttgagtactcaccagtcacagaaaagcatcttacggatggcatgacagtaagagaattatgcagtgctgccataaccatgagtgataacactgcggccaacttacttctgacaacgatcggaggaccgaaggagctaaccgcttttttgcacaacatgggggatcatgtaactcgccttgatcgttgggaaccggagctgaatgaagccataccaaacgacgagcgtgacaccacgatgcctgtagcaatggcaacaacgttgcgcaaactattaactggcgaactacttactctagcttcccggcaacaattaatagactggatggaggcggataaagttgcaggaccacttctgcgctcggcccttccggctggctggtttattgctgataaatctggagccggtgagcgtgggtctcgcggtatcattgcagcactggggccagatggtaagccctcccgtatcgtagttatctacacgacggggagtcaggcaactatggatgaacgaaatagacagatcgctgagataggtgcctcactgattaagcattggtaactgtcagaccaagtttactcatatatactttagattgatttaaaacttcatttttaatttaaaaggatctaggtgaagatcctttttgataatctcatgaccaaaatcccttaacgtgagttttcgttccactgagcgtcagaccccgtagaaaagatcaaaggatcttcttgagatcctttttttctgcgcgtaatctgctgcttgcaaacaaaaaaaccaccgctaccagcggtggtttgtttgccggatcaagagctaccaactctttttccgaaggtaactggcttcagcagagcgcagataccaaatactgtctttctagtgtagccgtagttaggccaccacttcaagaactctgtagcaccgcctacatacctcgctctgctaatcctgttaccagtggctgctgccagtggcgataagtcgtgtcttaccgggttggactcaagacgatagttaccggataaggcgcagcggtcgggctgaacggggggttcgtgcacacagcccagcttggagcgaacgacctacaccgaactgagatacctacagcgtgagctatgagaaagcgccacgcttcccgaagggagaaaggcggacaggtatccggtaagcggcagggtcggaacaggagagcgcacgagggagcttccagggggaaacgcctggtatctttatagtcctgtcgggtttcgccacctctgacttgagcgtcgatttttgtgatgctcgtcaggggggcggagcctatggaaaaacgccagcaacgcggcctttttacggttcctggccttttgctggccttttgctcacatgttctttcctgcgttatcccctgattctgtggataaccgtattaccgcctttgagtgagctgataccgctcgccgcagccgaacgaccgagcgcagcgagtcagtgagcgaggaagcggaagagcgcccaatacgcaaaccgcctctccccgcgcgttggccgattcattaatgcagctgtggaatgtgtgtcagttagggtgtggaaagtccccaggctccccagcaggcagaagtatgcaaagcatgcatctcaattagtcagcaaccaggtgtggaaagtccccaggctccccagcaggcagaagtatgcaaagcatgcatctcaattagtcagcaaccatagtcccgcccctaactccgcccatcccgcccctaactccgcccagttccgcccattctccgccccatggctgactaattttttttatttatgcagaggccgaggccgcctcggcctctgagctattccagaagtagtgaggaggcttttttggaggcctaggcttttgcaaaaagcttggacacaagacaggcttgcgagatatgtttgagaataccactttatcccgcgtcagggagaggcagtgcgtaaaaagacgcggactcatgtgaaatactggtttttagtgcgccagatctctataatctcgcgcaacctattttcccctcgaacactttttaagccgtagataaacaggctgggacacttcacatgagcgaaaaatacatcgtcacctgggacatgttgcagatccatgcacgtaaactcgcaagccgactgatgccttctgaacaatggaaaggcattattgccgtaagccgtggcggtctgtaccgggtgcgttactggcgcgtgaactgggtattcgtcatgtcgataccgtttgtatttccagctacgatcacgacaaccagcgcgagcttaaagtgctgaaacgcgcagaaggcgatggcgaaggcttcatcgttattgatgacctggtggataccggtggtactgcggttgcgattcgtgaaatgtatccaaaagcgcactttgtcaccatcttcgcaaaaccggctggtcgtccgctggttgatgactatgttgttgatatcccgcaagatacctggattgaacagccgtgggatatgggcgtcgtattcgtcccgccaatctccggtcgctaatcttttcaacgcctggcactgccgggcgttgttctttttaacttcaggcgggttacaatagtttccagtaagtattctggaggctgcatccatgacacaggcaaacctgagcgaaaccctgttcaaaccccgctttaaacatcctgaaacctcgacgctagtccgccgctttaatcacggcgcacaaccgcctgtgcagtcggcccttgatggtaaaaccatccctcactggtatcgcatgattaaccgtctgatgtggatctggcgcggcattgacccacgcgaaatcctcgacgtccaggcacgtattgtgatgagcgatgccgaacgtaccgacgatgatttatacgatacggtgattggctaccgtggcggcaactggatttatgagtgggccccggatctttgtgaaggaaccttacttctgtggtgtgacataattggacaaactacctacagagatttaaagctctaaggtaaatataaaatttttaagtgtataatgtgttaaactactgattctaattgtttgtgtattttagattccaacctatggaactgatgaatgggagcagtggtggaatgcctttaatgaggaaaacctgttttgctcagaagaaatgccatctagtgatgatgaggctactgctgactctcaacattctactcctccaaaaaagaagagaaaggtagaagaccccaaggactttccttcagaattgctaagttttttgagtcatgctgtgtttagtaatagaactcttgcttgctttgctatttacaccacaaaggaaaaagctgcactgctatacaagaaaattatggaaaaatattctgtaacctttataagtaggcataacagttataatcataacatactgttttttcttactccacacaggcatagagtgtctgctattaataactatgctcaaaaattgtgtacctttagctttttaatttgtaaaggggttaataaggaatatttgatgtatagtgccttgactagagatcataatcagccataccacatttgtagaggttttacttgctttaaaaaacctcccacacctccccctgaacctgaaacataaaatgaatgcaattgttgttgttaacttgtttattgcagcttataatggttacaaataaagcaatagcatcacaaatttcacaaataaagcatttttttcactgcattctagttgtggtttgtccaaactcatcaatgtatcttatcatgtctggatcaactggataactcaagctaaccaaaatcatcccaaacttcccaccccataccctattaccactgccaattacctagtggtttcatttactctaaacctgtgattcctctgaattattttcattttaaagaaattgtatttgttaaatatgtactacaaacttagtagttggaagggctaattcactcccaaagaagacaagatatccttgatctgtggatctaccacacacaaggctacttccctgattagcagaactacacaccagggccaggggtcagatatccactgacctttggatggtgctacaagctagtaccagttgagccagataaggtagaagaggccaataaaggagagaacaccagcttgttacaccctgtgagcctgcatgggatggatgacccggagagagaagtgttagagtggaggtttgacagccgcctagcatttcatcacgtggcccgagagctgcatccggagtacttcaagaactgctgatatcgagcttgctacaagggactttccgctggggactttccagggaggcgtggcctgggcgggactggggagtggcgagccctcagatcctgcatataagcagctgctttttgcctgtactgggtctctctggttagaccagatctgagcctgggagctctctggctaactagggaacccactgcttaagcctcaataaagcttgccttgagtgcttcaagtagtgtgtgcccgtctgttgtgtgactctggtaactagagatccctcagacccttttagtcagtgtggaaaatctctagcagtggcgcccgaacagggacttgaaagcgaaagggaaaccagaggagctctctcgacgcaggactcggcttgctgaagcgcgcacggcaagaggcgaggggcggcgactggtgagtacgccaaaaattttgactagcggaggctagaaggagagagatgggtgcgagagcgtcagtattaagcgggggagaattagatcgcgatgggaaaaaattcggttaaggccagggggaaagaaaaaatataaattaaaacatatagtatgggcaagcagggagctagaacgattcgcagttaatcctggcctgttagaaacatcagaaggctgtagacaaatactgggacagctacaaccatcccttcagacaggatcagaagaacttagatcattatataatacagtagcaaccctctattgtgtgcatcaaaggatagagataaaagacaccaaggaagctttagacaagatagaggaagagcaaaacaaaagtaagaccaccgcacagcaagcggccggccgctgatcttcagacctggaggaggagatatgagggacaattggagaagtgaattatataaatataaagtagtaaaaattgaaccattaggagtagcacccaccaaggcaaagagaagagtggtgcagagagaaaaaagagcagtgggaataggagctttgttccttgggttcttgggagcagcaggaagcactatgggcgcagcgtcaatgacgctgacggtacaggccagacaattattgtctggtatagtgcagcagcagaacaatttgctgagggctattgaggcgcaacagcatctgttgcaactcacagtctggggcatcaagcagctccaggcaagaatcctggctgtgaaagatacctaaaggatcaacagctcctggggatttggggttgctctggaaaactcatttgcaccactgctgtgccttggaatgctagttggagtaataaatctctggaacagatttggaatcacacgacctggatggagtgggacagagaaattaacaattacacaagcttaatacactccttaattgaagaatcgcaaaaccagcaagaaaagaatgaacaagaattattggaattagataaatgggcaagtttgtggaattggtttaacataacaaattggctgtggtatataaaattattcataatgatagtaggaggcttggtaggtttaagaatagtttttgctgtactttctatagtgaatagagttaggcagggatattcaccattatcgtttcagacccacctcccaaccccgaggggacccgacaggcccgaaggaatagaagaagaaggtggagagagagacagagacagatccattcgattagtgaacggatctcgacggtatcgccaaatggcagtattcatccacaattttaaaagaaaaggggggattggggggtacagtgcaggggaaagaatagtagacataatagcaacagacatacaaactaaagaattacaaaaacaaattacaaaaattcaaaattttcgggtttattacagggacagcagagatccagtttggatcgataagcttgatatcgaattcctgcagcccgtgaggctccggtgcccgtcagtgggcagagcgcacatcgcccacagtccccgagaagttggggggaggggtcggcaattgaaccggtgcctagagaaggtggcgcggggtaaactgggaaagtgatgtcgtgtactggctccgcctttttcccgagggtgggggagaaccgtatataagtgcagtagtcgccgtgaacgttctttttcgcaacgggtttgccgccagaacacaggtaagtgccgtgtgtggttcccgcgggcctggcctctttacgggttatggcccttgcgtgccttgaattacttccacctggctgcagtacgtgattcttgatcccgagcttcgggttggaagtgggtgggagagttcgaggccttgcgcttaaggagccccttcgcctcgtgcttgagttgaggcctggcctgggcgctggggccgccgcgtgcgaatctggtggcaccttcgcgcctgtctcgctgctttcgataagtctctagccatttaaaatttttgatgacctgctgcgacgctttttttctggcaagatagtcttgtaaatgcgggccaagatctgcacactggtatttcggtttttggggccgcgggcggcgacggggcccgtgcgtcccagcgcacatgttcggcgaggcggggcctgcgagcgcggccaccgagaatcggacgggggtagtctcaagctggccggcctgctctggtgcctggcctcgcgccgccgtgtatcgccccgccctgggcggcaaggctggcccggtcggcaccagttgcgtgagcggaaagatggccgcttcccggccctgctgcagggagctcaaaatggaggacgcggcgctcgggagagcgggcgggtgagtcacccacacaaaggaaaagggcctttccgtcctcagccgtcgcttcatgtgactccacggagtaccgggcgccgtccaggcacctcgattagttctcgagcttttggagtacgtcgtctttaggttggggggaggggttttatgcgatggagtttccccacactgagtgggtggagactgaagttaggccagcttggcacttgatgtaattctccttggaatttgccctttttgagtttggatcttggttcattctcaagcctcagacagtggttcaaagtttttttcttccatttcaggtgtcgtgaggggatctggagctctcgagaattctcacgcgtgccgccaccatggccttaccagtgaccgccttgctcctgccgctggccttgctgctccacgccgccaggccggacatccagatgacacagactacatcctccctgtctgcctctctgggagacagagtcaccatcagttgcagggcaagtcaggacattagtaaatatttaaattggtatcagcagaaaccagatggaactgttaaactcctgatctaccatacatcaagattacactcaggagtcccatcaaggttcagtggcagtgggtctggaacagattattctctcaccattagcaacctggagcaagaagatattgccacttacttttgccaacagggtaatacgcttccgtacacgttcggaggcggcaccaagctggagatcacaggtggcggtggctcgggcggtggtgggtcgggtggcggcggatctgaggtgaaactgcaggagtcaggacctggcctggtggcgccctcacagagcctgtccgtcacatgcactgtctcaggggtctcattacccgactatggtgtaagctggattcgccagcctccacgaaagggtctggagtggctgggagtaatatggggtagtgaaaccacatactataattcagctctcaaatccagactgaccatcatcaaggacaactccaagagccaagttttcttaaaaatgaacagtctgcaaactgatgacacagccatttactactgtgccaaacattattactacggtggtagctatgctatggactactggggccaaggaacctcagtcaccgtctcctcagggaagcctatcccgaaccctctgttgggtctcgatagtaccaatggggccgcaaccacgacgccagcgccgcgaccaccaacaccggcgcccaccatcgcgttgcagcccctgtccctgcgcccagaggcgtgccggccagcggcggggggcgcagtgcacacgagggggctggacttcgcctgtgatttttgggtgctggtggtggttggtggagtcctggcttgctatagcttgctagtaacagtggcctttattattttctgggtgaggagtaagaggagcaggctcctgcacagtgactacatgaacatgactccccgccgccccgggcccacccgcaagcattaccagccctatgccccaccacgcgacttcgcagcctatcgctccgggggtaccgaattcagcgggtcaggcggatctggaagtggtggtggagaacttgatgaattggtatacttactagatgggccaggttatgaccctatacattgcgatgtagtgacaaggggcggcagccaccttttcaattttggaagcggagctactaacttcagcctgctgaagcaggctggagacgtggaggagaaccctggacctatgattcatcttggtcacatcctcttcttgctgctgttgccagttgctgccgcacaaacaaccccaggtgagaggtcaagtcttcccgccttctatccgggcacaagcgggagttgtagtgggtgtggatctttgtcccttcctatatacatctgggctcctctggctggcacttgcggagtgctcctgctgagtctggttattaccagagtgaagttcagcaggagcgcagacgcccccgcgtacaagcagggccagaaccagctctataacgagctcaatctaggacgaagagaggagtacgatgttttggacaagagacgtggccgggaccctgagatggggggaaagccgagaaggaagaaccctcaggaaggcctgtacaatgaactgcagaaagataagatggcggaggcctacagtgagattgggatgaaaggcgagcgccggaggggcaaggggcacgatggcctttaccagggtctcagtacagccaccaaggacacctacgacgcccttcacatgcaggccctgccccctcgcggttctgttgttattgttggtagaattattttatctggtagtggtagtatcacggcctactcccaacagacgcggggcctacttggttgcatcatcactagcctcacaggccgggacaagaaccaggtcgaaggggaggttcaagtggtttctaccgcaacacaatctttcctggcgacctgcgtcaacggcgtgtgctggactgtctaccatggcgctggctcgaagaccctagccggtccaaaaggtccaatcacccaaatgtacaccaatgtagaccaggacctcgtcggctggcaggcgcctccaggggcgcgctccttgacaccatgcacctgtggcagctcggacctttacttggtcacgagacatgctgatgtcattccggtgcgccggcgaggcgacagcaggggaagtctactctcccccaggcccgtctcctacctgaaaggctccgcaggtggtccattgctttgcccttcggggcacgctgtgggcatcttccgggctgctgtgtgcacccggggggtcgcgaaggcggtggacttcgtgcccgttgagtctatggaaactaccatgcggtctggcatggtgagcaagggcgaggaggataacatggccatcatcaaggagttcatgcgcttcaaggtgcacatggagggctccgtgaacggccacgagttcgagatcgagggcgagggcgagggccgcccctacgagggcacccagaccgccaagctgaaggtgaccaagggtggccccctgcccttcgcctgggacatcctgtcccctcagttcatgtacggctccaaggcctacgtgaagcaccccgccgacatccccgactacttgaagctgtccttccccgagggcttcaagtgggagcgcgtgatgaacttcgaggacggcggcgtggtgaccgtgacccaggactcctccctgcaggacggcgagttcatctacaaggtgaagctgcgcggcaccaacttcccctccgacggccccgtaatgcagaagaagaccatgggctgggaggcctcctccgagcggatgtaccccgaggacggcgccctgaagggcgagatcaagcagaggctgaagctgaaggacggcggccactacgacgctgaggtcaagaccacctacaaggccaagaagcccgtgcagctgcccggcgcctacaacgtcaacatcaagttggacatcacctcccacaacgaggactacaccatcgtggaacagtacgaacgcgccgagggccgccactccaccggcggcatggacgagctgtacaagtaagcggccgcgactctagagtcgacctgcaggcatgcaagcttgatatcaagcttatcgataatcaacctctggattacaaaatttgtgaaagattgactggtattcttaactatgttgctccttttacgctatgtggatacgctgctttaatgcctttgtatcatgctattgcttcccgtatggctttcattttctcctccttgtataaatcctggttgctgtctctttatgaggagttgtggcccgttgtcaggcaacgtggcgtggtgtgcactgtgtttgctgacgcaacccccactggttggggcattgccaccacctgtcagctcctttccgggactttcgctttccccctccctattgccacggcggaactcatcgccgcctgccttgcccgctgctggacaggggctcggctgttgggcactgacaattccgtggtgttgtcggggaaatcatcgtcctttccttggctgctcgcctgtgttgccacctggattctgcgcgggacgtccttctgctacgtcccttcggccctcaatccagcggaccttccttcccgcggcctgctgccggctctgcggcctcttccgcgtcttcgccttcgccctcagacgagtcggatctccctttgggccgcctccccgcat

SEQ ID NO: 258 - DNA, 13143 bp, Artificial Sequence
  synthetic vector
cgataccgtcgacctcgagggaattaattcgagctcggtacctttaagaccaatgacttacaaggcagctgtagatcttagccactttttaaaagaaaaggggggactggaagggctaattcactcccaacgaagacaagatctgctttttgcttgtactgggtctctctggttagaccagatctgagcctgggagctctctggctaactagggaacccactgcttaagcctcaataaagcttgccttgagtgcttcaagtagtgtgtgcccgtctgttgtgtgactctggtaactagagatccctcagacccttttagtcagtgtggaaaatctctagcagcatctagaattaattccgtgtattctatagtgtcacctaaatcgtatgtgtatgatacataaggttatgtattaattgtagccgcgttctaacgacaatatgtacaagcctaattgtgtagcatctggcttactgaagcagaccctatcatctctctcgtaaactgccgtcagagtcggtttggttggacgaaccttctgagtttctggtaacgccgtcccgcacccggaaatggtcagcgaaccaatcagcagggtcatcgctagccagatcctctacgccggacgcatcgtggccggcatcaccggcgccacaggtgcggttgctggcgcctatatcgccgacatcaccgatggggaagatcgggctcgccacttcgggctcatgagcgcttgtttcggcgtgggtatggtggcaggccccgtggccgggggactgttgggcgccatctccttgcatgcaccattccttgcggcggcggtgctcaacggcctcaacctactactgggctgcttcctaatgcaggagtcgcataagggagagcgtcgaatggtgcactctcagtacaatctgctctgatgccgcatagttaagccagccccgacacccgccaacacccgctgacgcgccctgacgggcttgtctgctcccggcatccgcttacagacaagctgtgaccgtctccgggagctgcatgtgtcagaggttttcaccgtcatcaccgaaacgcgcgagacgaaagggcctcgtgatacgcctatttttataggttaatgtcatgataataatggtttcttagacgtcaggtggcacttttcggggaaatgtgcgcggaacccctatttgtttatttttctaaatacattcaaatatgtatccgctcatgagacaataaccctgataaatgcttcaataatattgaaaaaggaagagtatgagtattcaacatttccgtgtcgcccttattcccttttttgcggcattttgccttcctgtttttgctcacccagaaacgctggtgaaagtaaaagatgctgaagatcagttgggtgcacgagtgggttacatcgaactggatctcaacagcggtaagatccttgagagttttcgccccgaagaacgttttccaatgatgagcacttttaaagttctgctatgtggcgcggtattatcccgtattgacgccgggcaagagcaactcggtcgccgcatacactattctcagaatgacttggttgagtactcaccagtcacagaaaagcatcttacggatggcatgacagtaagagaattatgcagtgctgccataaccatgagtgataacactgcggccaacttacttctgacaacgatcggaggaccgaaggagctaaccgcttttttgcacaacatgggggatcatgtaactcgccttgatcgttgggaaccggagctgaatgaagccataccaaacgacgagcgtgacaccacgatgcctgtagcaatggcaacaacgttgcgcaaactattaactggcgaactacttactctagcttcccggcaacaattaatagactggatggaggcggataaagttgcaggaccacttctgcgctcggcccttccggctggctggtttattgctgataaatctggagccggtgagcgtgggtctcgcggtatcattgcagcactggggccagatggtaagccctcccgtatcgtagttatctacacgacggggagtcaggcaactatggatgaacgaaatagacagatcgctgagataggtgcctcactgattaagcattggtaactgtcagaccaagtttactcatatatactttagattgatttaaaacttcatttttaatttaaaaggatctaggtgaagatcctttttgataatctcatgaccaaaatcccttaacgtgagttttcgttccactgagcgtcagaccccgtagaaaagatcaaaggatcttcttgagatcctttttttctgcgcgtaatctgctgcttgcaaacaaaaaaaccaccgctaccagcggtggtttgtttgccggatcaagagctaccaactctttttccgaaggtaactggcttcagcagagcgcagataccaaatactgtctttctagtgtagccgtagttaggccaccacttcaagaactctgtagcaccgcctacatacctcgctctgctaatcctgttaccagtggctgctgccagtggcgataagtcgtgtcttaccgggttggactcaagacgatagttaccggataaggcgcagcggtcgggctgaacggggggttcgtgcacacagcccagcttggagcgaacgacctacaccgaactgagatacctacagcgtgagctatgagaaagcgccacgcttcccgaagggagaaaggcggacaggtatccggtaagcggcagggtcggaacaggagagcgcacgagggagcttccagggggaaacgcctggtatctttatagtcctgtcgggtttcgccacctctgacttgagcgtcgatttttgtgatgctcgtcaggggggcggagcctatggaaaaacgccagcaacgcggcctttttacggttcctggccttttgctggccttttgctcacatgttctttcctgcgttatcccctgattctgtggataaccgtattaccgcctttgagtgagctgataccgctcgccgcagccgaacgaccgagcgcagcgagtcagtgagcgaggaagcggaagagcgcccaatacgcaaaccgcctctccccgcgcgttggccgattcattaatgcagctgtggaatgtgtgtcagttagggtgtggaaagtccccaggctccccagcaggcagaagtatgcaaagcatgcatctcaattagtcagcaaccaggtgtggaaagtccccaggctccccagcaggcagaagtatgcaaagcatgcatctcaattagtcagcaaccatagtcccgcccctaactccgcccatcccgcccctaactccgcccagttccgcccattctccgccccatggctgactaattttttttatttatgcagaggccgaggccgcctcggcctctgagctattccagaagtagtgaggaggcttttttggaggcctaggcttttgcaaaaagcttggacacaagacaggcttgcgagatatgtttgagaataccactttatcccgcgtcagggagaggcagtgcgtaaaaagacgcggactcatgtgaaatactggtttttagtgcgccagatctctataatctcgcgcaacctattttcccctcgaacactttttaagccgtagataaacaggctgggacacttcacatgagcgaaaaatacatcgtcacctgggacatgttgcagatccatgcacgtaaactcgcaagccgactgatgccttctgaacaatggaaaggcattattgccgtaagccgtggcggtctgtaccgggtgcgttactggcgcgtgaactgggtattcgtcatgtcgataccgtttgtatttccagctacgatcacgacaaccagcgcgagcttaaagtgctgaaacgcgcagaaggcgatggcgaaggcttcatcgttattgatgacctggtggataccggtggtactgcggttgcgattcgtgaaatgtatccaaaagcgcactttgtcaccatcttcgcaaaaccggctggtcgtccgctggttgatgactatgttgttgatatcccgcaagatacctggattgaacagccgtgggatatgggcgtcgtattcgtcccgccaatctccggtcgctaatcttttcaacgcctggcactgccgggcgttgttctttttaacttcaggcgggttacaatagtttccagtaagtattctggaggctgcatccatgacacaggcaaacctgagcgaaaccctgttcaaaccccgctttaaacatcctgaaacctcgacgctagtccgccgctttaatcacggcgcacaaccgcctgtgcagtcggcccttgatggtaaaaccatccctcactggtatcgcatgattaaccgtctgatgtggatctggcgcggcattgacccacgcgaaatcctcgacgtccaggcacgtattgtgatgagcgatgccgaacgtaccgacgatgatttatacgatacggtgattggctaccgtggcggcaactggatttatgagtgggccccggatctttgtgaaggaaccttacttctgtggtgtgacataattggacaaactacctacagagatttaaagctctaaggtaaatataaaatttttaagtgtataatgtgttaaactactgattctaattgtttgtgtattttagattccaacctatggaactgatgaatgggagcagtggtggaatgcctttaatgaggaaaacctgttttgctcagaagaaatgccatctagtgatgatgaggctactgctgactctcaacattctactcctccaaaaaagaagagaaaggtagaagaccccaaggactttccttcagaattgctaagttttttgagtcatgctgtgtttagtaatagaactcttgcttgctttgctatttacaccacaaaggaaaaagctgcactgctatacaagaaaattatggaaaaatattctgtaacctttataagtaggcataacagttataatcataacatactgttttttcttactccacacaggcatagagtgtctgctattaataactatgctcaaaaattgtgtacctttagctttttaatttgtaaaggggttaataaggaatatttgatgtatagtgccttgactagagatcataatcagccataccacatttgtagaggttttacttgctttaaaaaacctcccacacctccccctgaacctgaaacataaaatgaatgcaattgttgttgttaacttgtttattgcagcttataatggttacaaataaagcaatagcatcacaaatttcacaaataaagcatttttttcactgcattctagttgtggtttgtccaaactcatcaatgtatcttatcatgtctggatcaactggataactcaagctaaccaaaatcatcccaaacttcccaccccataccctattaccactgccaattacctagtggtttcatttactctaaacctgtgattcctctgaattattttcattttaaagaaattgtatttgttaaatatgtactacaaacttagtagttggaagggctaattcactcccaaagaagacaagatatccttgatctgtggatctaccacacacaaggctacttccctgattagcagaactacacaccagggccaggggtcagatatccactgacctttggatggtgctacaagctagtaccagttgagccagataaggtagaagaggccaataaaggagagaacaccagcttgttacaccctgtgagcctgcatgggatggatgacccggagagagaagtgttagagtggaggtttgacagccgcctagcatttcatcacgtggcccgagagctgcatccggagtacttcaagaactgctgatatcgagcttgctacaagggactttccgctggggactttccagggaggcgtggcctgggcgggactggggagtggcgagccctcagatcctgcatataagcagctgctttttgcctgtactgggtctctctggttagaccagatctgagcctgggagctctctggctaactagggaacccactgcttaagcctcaataaagcttgccttgagtgcttcaagtagtgtgtgcccgtctgttgtgtgactctggtaactagagatccctcagacccttttagtcagtgtggaaaatctctagcagtggcgcccgaacagggacttgaaagcgaaagggaaaccagaggagctctctcgacgcaggactcggcttgctgaagcgcgcacggcaagaggcgaggggcggcgactggtgagtacgccaaaaattttgactagcggaggctagaaggagagagatgggtgcgagagcgtcagtattaagcgggggagaattagatcgcgatgggaaaaaattcggttaaggccagggggaaagaaaaaatataaattaaaacatatagtatgggcaagcagggagctagaacgattcgcagttaatcctggcctgttagaaacatcagaaggctgtagacaaatactgggacagctacaaccatcccttcagacaggatcagaagaacttagatcattatataatacagtagcaaccctctattgtgtgcatcaaaggatagagataaaagacaccaaggaagctttagacaagatagaggaagagcaaaacaaaagtaagaccaccgcacagcaagcggccggccgctgatcttcagacctggaggaggagatatgagggacaattggagaagtgaattatataaatataaagtagtaaaaattgaaccattaggagtagcacccaccaaggcaaagagaagagtggtgcagagagaaaaaagagcagtgggaataggagctttgttccttgggttcttgggagcagcaggaagcactatgggcgcagcgtcaatgacgctgacggtacaggccagacaattattgtctggtatagtgcagcagcagaacaatttgctgagggctattgaggcgcaacagcatctgttgcaactcacagtctggggcatcaagcagctccaggcaagaatcctggctgtgaaagatacctaaaggatcaacagctcctggggatttggggttgctctggaaaactcatttgcaccactgctgtgccttggaatgctagttggagtaataaatctctggaacagatttggaatcacacgacctggatggagtgggacagagaaattaacaattacacaagcttaatacactccttaattgaagaatcgcaaaaccagcaagaaaagaatgaacaagaattattggaattagataaatgggcaagtttgtggaattggtttaacataacaaattggctgtggtatataaaattattcataatgatagtaggaggcttggtaggtttaagaatagtttttgctgtactttctatagtgaatagagttaggcagggatattcaccattatcgtttcagacccacctcccaaccccgaggggacccgacaggcccgaaggaatagaagaagaaggtggagagagagacagagacagatccattcgattagtgaacggatctcgacggtatcgccaaatggcagtattcatccacaattttaaaagaaaaggggggattggggggtacagtgcaggggaaagaatagtagacataatagcaacagacatacaaactaaagaattacaaaaacaaattacaaaaattcaaaattttcgggtttattacagggacagcagagatccagtttggatcgataagcttgatatcgaattcctgcagcccgtgaggctccggtgcccgtcagtgggcagagcgcacatcgcccacagtccccgagaagttggggggaggggtcggcaattgaaccggtgcctagagaaggtggcgcggggtaaactgggaaagtgatgtcgtgtactggctccgcctttttcccgagggtgggggagaaccgtatataagtgcagtagtcgccgtgaacgttctttttcgcaacgggtttgccgccagaacacaggtaagtgccgtgtgtggttcccgcgggcctggcctctttacgggttatggcccttgcgtgccttgaattacttccacctggctgcagtacgtgattcttgatcccgagcttcgggttggaagtgggtgggagagttcgaggccttgcgcttaaggagccccttcgcctcgtgcttgagttgaggcctggcctgggcgctggggccgccgcgtgcgaatctggtggcaccttcgcgcctgtctcgctgctttcgataagtctctagccatttaaaatttttgatgacctgctgcgacgctttttttctggcaagatagtcttgtaaatgcgggccaagatctgcacactggtatttcggtttttggggccgcgggcggcgacggggcccgtgcgtcccagcgcacatgttcggcgaggcggggcctgcgagcgcggccaccgagaatcggacgggggtagtctcaagctggccggcctgctctggtgcctggcctcgcgccgccgtgtatcgccccgccctgggcggcaaggctggcccggtcggcaccagttgcgtgagcggaaagatggccgcttcccggccctgctgcagggagctcaaaatggaggacgcggcgctcgggagagcgggcgggtgagtcacccacacaaaggaaaagggcctttccgtcctcagccgtcgcttcatgtgactccacggagtaccgggcgccgtccaggcacctcgattagttctcgagcttttggagtacgtcgtctttaggttggggggaggggttttatgcgatggagtttccccacactgagtgggtggagactgaagttaggccagcttggcacttgatgtaattctccttggaatttgccctttttgagtttggatcttggttcattctcaagcctcagacagtggttcaaagtttttttcttccatttcaggtgtcgtgaggggatctggagctctcgagaattctcacgcgtgccgccaccatggccttaccagtgaccgccttgctcctgccgctggccttgctgctccacgccgccaggccggacatccagatgacacagactacatcctccctgtctgcctctctgggagacagagtcaccatcagttgcagggcaagtcaggacattagtaaatatttaaattggtatcagcagaaaccagatggaactgttaaactcctgatctaccatacatcaagattacactcaggagtcccatcaaggttcagtggcagtgggtctggaacagattattctctcaccattagcaacctggagcaagaagatattgccacttacttttgccaacagggtaatacgcttccgtacacgttcggaggcggcaccaagctggagatcacaggtggcggtggctcgggcggtggtgggtcgggtggcggcggatctgaggtgaaactgcaggagtcaggacctggcctggtggcgccctcacagagcctgtccgtcacatgcactgtctcaggggtctcattacccgactatggtgtaagctggattcgccagcctccacgaaagggtctggagtggctgggagtaatatggggtagtgaaaccacatactataattcagctctcaaatccagactgaccatcatcaaggacaactccaagagccaagttttcttaaaaatgaacagtctgcaaactgatgacacagccatttactactgtgccaaacattattactacggtggtagctatgctatggactactggggccaaggaacctcagtcaccgtctcctcagggaagcctatcccgaaccctctgttgggtctcgatagtaccaatggggccgcaaccacgacgccagcgccgcgaccaccaacaccggcgcccaccatcgcgttgcagcccctgtccctgcgcccagaggcgtgccggccagcggcggggggcgcagtgcacacgagggggctggacttcgcctgtgatttttgggtgctggtggtggttggtggagtcctggcttgctatagcttgctagtaacagtggcctttattattttctgggtgaggagtaagaggagcaggctcctgcacagtgactacatgaacatgactccccgccgccccgggcccacccgcaagcattaccagccctatgccccaccacgcgacttcgcagcctatcgctccaaacggggcagaaagaaactcctgtatatattcaaacaaccatttatgagaccagtacaaactactcaagaggaagatggctgtagctgccgatttccagaagaagaagaaggaggatgtgaactggggggtaccgaattcagcgggtcaggcggatctggaagtggtggtggagaacttgatgaattggtatacttactagatgggccaggttatgaccctatacattgcgatgtagtgacaaggggcggcagccaccttttcaattttggaagcggagctactaacttcagcctgctgaagcaggctggagacgtggaggagaaccctggacctatgattcatcttggtcacatcctcttcttgctgctgttgccagttgctgccgcacaaacaaccccaggtgagaggtcaagtcttcccgccttctatccgggcacaagcgggagttgtagtgggtgtggatctttgtcccttcctatatacatctgggctcctctggctggcacttgcggagtgcttctgctgagtctggttattaccaaacggggcagaaagaaactcctgtatatattcaaacaaccatttatgagaccagtacaaactactcaagaggaagatggctgtagctgccgatttccagaagaagaagaaggaggatgtgaactgggttctgttgttattgttggtagaattattttatctggtagtggtagtatcacggcctactcccaacagacgcggggcctacttggttgcatcatcactagcctcacaggccgggacaagaaccaggtcgaaggggaggttcaagtggtttctaccgcaacacaatctttcctggcgacctgcgtcaacggcgtgtgctggactgtctaccatggcgctggctcgaagaccctagccggtccaaaaggtccaatcacccaaatgtacaccaatgtagaccaggacctcgtcggctggcaggcgcctccaggggcgcgctccttgacaccatgcacctgtggcagctcggacctttacttggtcacgagacatgctgatgtcattccggtgcgccggcgaggcgacagcaggggaagtctactctcccccaggcccgtctcctacctgaaaggctccgcaggtggtccattgctttgcccttcggggcacgctgtgggcatcttccgggctgctgtgtgcacccggggggtcgcgaaggcggtggacttcgtgcccgttgagtctatggaaactaccatgcggtctagagtgaagttcagcaggagcgcagacgcccccgcgtacaagcagggccagaaccagctctataacgagctcaatctaggacgaagagaggagtacgatgttttggacaagagacgtggccgggaccctgagatggggggaaagccgagaaggaagaaccctcaggaaggcctgtacaatgaactgcagaaagataagatggcggaggcctacagtgagattgggatgaaaggcgagcgccggaggggcaaggggcacgatggcctttaccagggtctcagtacagccaccaaggacacctacgacgcccttcacatgcaggccctgccccctcgcggcatggtgagcaagggcgaggaggataacatggccatcatcaaggagttcatgcgcttcaaggtgcacatggagggctccgtgaacggccacgagttcgagatcgagggcgagggcgagggccgcccctacgagggcacccagaccgccaagctgaaggtgaccaagggtggccccctgcccttcgcctgggacatcctgtcccctcagttcatgtacggctccaaggcctacgtgaagcaccccgccgacatccccgactacttgaagctgtccttccccgagggcttcaagtgggagcgcgtgatgaacttcgaggacggcggcgtggtgaccgtgacccaggactcctccctgcaggacggcgagttcatctacaaggtgaagctgcgcggcaccaacttcccctccgacggccccgtaatgcagaagaagaccatgggctgggaggcctcctccgagcggatgtaccccgaggacggcgccctgaagggcgagatcaagcagaggctgaagctgaaggacggcggccactacgacgctgaggtcaagaccacctacaaggccaagaagcccgtgcagctgcccggcgcctacaacgtcaacatcaagttggacatcacctcccacaacgaggactacaccatcgtggaacagtacgaacgcgccgagggccgccactccaccggcggcatggacgagctgtacaagtaagcggccgcgactctagagtcgacctgcaggcatgcaagcttgatatcaagcttatcgataatcaacctctggattacaaaatttgtgaaagattgactggtattcttaactatgttgctccttttacgctatgtggatacgctgctttaatgcctttgtatcatgctattgcttcccgtatggctttcattttctcctccttgtataaatcctggttgctgtctctttatgaggagttgtggcccgttgtcaggcaacgtggcgtggtgtgcactgtgtttgctgacgcaacccccactggttggggcattgccaccacctgtcagctcctttccgggactttcgctttccccctccctattgccacggcggaactcatcgccgcctgccttgcccgctgctggacaggggctcggctgttgggcactgacaattccgtggtgttgtcggggaaatcatcgtcctttccttggctgctcgcctgtgttgccacctggattctgcgcgggacgtccttctgctacgtcccttcggccctcaatccagcggaccttccttcccgcggcctgctgccggctctgcggcctcttccgcgtcttcgccttcgccctcagacgagtcggatctccctttgggccgcctccccgcat

SEQ ID NO: 259 - DNA, 13143 bp, Artificial Sequence
  synthetic vector
cgataccgtcgacctcgagggaattaattcgagctcggtacctttaagaccaatgacttacaaggcagctgtagatcttagccactttttaaaagaaaaggggggactggaagggctaattcactcccaacgaagacaagatctgctttttgcttgtactgggtctctctggttagaccagatctgagcctgggagctctctggctaactagggaacccactgcttaagcctcaataaagcttgccttgagtgcttcaagtagtgtgtgcccgtctgttgtgtgactctggtaactagagatccctcagacccttttagtcagtgtggaaaatctctagcagcatctagaattaattccgtgtattctatagtgtcacctaaatcgtatgtgtatgatacataaggttatgtattaattgtagccgcgttctaacgacaatatgtacaagcctaattgtgtagcatctggcttactgaagcagaccctatcatctctctcgtaaactgccgtcagagtcggtttggttggacgaaccttctgagtttctggtaacgccgtcccgcacccggaaatggtcagcgaaccaatcagcagggtcatcgctagccagatcctctacgccggacgcatcgtggccggcatcaccggcgccacaggtgcggttgctggcgcctatatcgccgacatcaccgatggggaagatcgggctcgccacttcgggctcatgagcgcttgtttcggcgtgggtatggtggcaggccccgtggccgggggactgttgggcgccatctccttgcatgcaccattccttgcggcggcggtgctcaacggcctcaacctactactgggctgcttcctaatgcaggagtcgcataagggagagcgtcgaatggtgcactctcagtacaatctgctctgatgccgcatagttaagccagccccgacacccgccaacacccgctgacgcgccctgacgggcttgtctgctcccggcatccgcttacagacaagctgtgaccgtctccgggagctgcatgtgtcagaggttttcaccgtcatcaccgaaacgcgcgagacgaaagggcctcgtgatacgcctatttttataggttaatgtcatgataataatggtttcttagacgtcaggtggcacttttcggggaaatgtgcgcggaacccctatttgtttatttttctaaatacattcaaatatgtatccgctcatgagacaataaccctgataaatgcttcaataatattgaaaaaggaagagtatgagtattcaacatttccgtgtcgcccttattcccttttttgcggcattttgccttcctgtttttgctcacccagaaacgctggtgaaagtaaaagatgctgaagatcagttgggtgcacgagtgggttacatcgaactggatctcaacagcggtaagatccttgagagttttcgccccgaagaacgttttccaatgatgagcacttttaaagttctgctatgtggcgcggtattatcccgtattgacgccgggcaagagcaactcggtcgccgcatacactattctcagaatgacttggttgagtactcaccagtcacagaaaagcatcttacggatggcatgacagtaagagaattatgcagtgctgccataaccatgagtgataacactgcggccaacttacttctgacaacgatcggaggaccgaaggagctaaccgcttttttgcacaacatgggggatcatgtaactcgccttgatcgttgggaaccggagctgaatgaagccataccaaacgacgagcgtgacaccacgatgcctgtagcaatggcaacaacgttgcgcaaactattaactggcgaactacttactctagcttcccggcaacaattaatagactggatggaggcggataaagttgcaggaccacttctgcgctcggcccttccggctggctggtttattgctgataaatctggagccggtgagcgtgggtctcgcggtatcattgcagcactggggccagatggtaagccctcccgtatcgtagttatctacacgacggggagtcaggcaactatggatgaacgaaatagacagatcgctgagataggtgcctcactgattaagcattggtaactgtcagaccaagtttactcatatatactttagattgatttaaaacttcatttttaatttaaaaggatctaggtgaagatcctttttgataatctcatgaccaaaatcccttaacgtgagttttcgttccactgagcgtcagaccccgtagaaaagatcaaaggatcttcttgagatcctttttttctgcgcgtaatctgctgcttgcaaacaaaaaaaccaccgctaccagcggtggtttgtttgccggatcaagagctaccaactctttttccgaaggtaactggcttcagcagagcgcagataccaaatactgtctttctagtgtagccgtagttaggccaccacttcaagaactctgtagcaccgcctacatacctcgctctgctaatcctgttaccagtggctgctgccagtggcgataagtcgtgtcttaccgggttggactcaagacgatagttaccggataaggcgcagcggtcgggctgaacggggggttcgtgcacacagcccagcttggagcgaacgacctacaccgaactgagatacctacagcgtgagctatgagaaagcgccacgcttcccgaagggagaaaggcggacaggtatccggtaagcggcagggtcggaacaggagagcgcacgagggagcttccagggggaaacgcctggtatctttatagtcctgtcgggtttcgccacctctgacttgagcgtcgatttttgtgatgctcgtcaggggggcggagcctatggaaaaacgccagcaacgcggcctttttacggttcctggccttttgctggccttttgctcacatgttctttcctgcgttatcccctgattctgtggataaccgtattaccgcctttgagtgagctgataccgctcgccgcagccgaacgaccgagcgcagcgagtcagtgagcgaggaagcggaagagcgcccaatacgcaaaccgcctctccccgcgcgttggccgattcattaatgcagctgtggaatgtgtgtcagttagggtgtggaaagtccccaggctccccagcaggcagaagtatgcaaagcatgcatctcaattagtcagcaaccaggtgtggaaagtccccaggctccccagcaggcagaagtatgcaaagcatgcatctcaattagtcagcaaccatagtcccgcccctaactccgcccatcccgcccctaactccgcccagttccgcccattctccgccccatggctgactaattttttttatttatgcagaggccgaggccgcctcggcctctgagctattccagaagtagtgaggaggcttttttggaggcctaggcttttgcaaaaagcttggacacaagacaggcttgcgagatatgtttgagaataccactttatcccgcgtcagggagaggcagtgcgtaaaaagacgcggactcatgtgaaatactggtttttagtgcgccagatctctataatctcgcgcaacctattttcccctcgaacactttttaagccgtagataaacaggctgggacacttcacatgagcgaaaaatacatcgtcacctgggacatgttgcagatccatgcacgtaaactcgcaagccgactgatgccttctgaacaatggaaaggcattattgccgtaagccgtggcggtctgtaccgggtgcgttactggcgcgtgaactgggtattcgtcatgtcgataccgtttgtatttccagctacgatcacgacaaccagcgcgagcttaaagtgctgaaacgcgcagaaggcgatggcgaaggcttcatcgttattgatgacctggtggataccggtggtactgcggttgcgattcgtgaaatgtatccaaaagcgcactttgtcaccatcttcgcaaaaccggctggtcgtccgctggttgatgactatgttgttgatatcccgcaagatacctggattgaacagccgtgggatatgggcgtcgtattcgtcccgccaatctccggtcgctaatcttttcaacgcctggcactgccgggcgttgttctttttaacttcaggcgggttacaatagtttccagtaagtattctggaggctgcatccatgacacaggcaaacctgagcgaaaccctgttcaaaccccgctttaaacatcctgaaacctcgacgctagtccgccgctttaatcacggcgcacaaccgcctgtgcagtcggcccttgatggtaaaaccatccctcactggtatcgcatgattaaccgtctgatgtggatctggcgcggcattgacccacgcgaaatcctcgacgtccaggcacgtattgtgatgagcgatgccgaacgtaccgacgatgatttatacgatacggtgattggctaccgtggcggcaactggatttatgagtgggccccggatctttgtgaaggaaccttacttctgtggtgtgacataattggacaaactacctacagagatttaaagctctaaggtaaatataaaatttttaagtgtataatgtgttaaactactgattctaattgtttgtgtattttagattccaacctatggaactgatgaatgggagcagtggtggaatgcctttaatgaggaaaacctgttttgctcagaagaaatgccatctagtgatgatgaggctactgctgactctcaacattctactcctccaaaaaagaagagaaaggtagaagaccccaaggactttccttcagaattgctaagttttttgagtcatgctgtgtttagtaatagaactcttgcttgctttgctatttacaccacaaaggaaaaagctgcactgctatacaagaaaattatggaaaaatattctgtaacctttataagtaggcataacagttataatcataacatactgttttttcttactccacacaggcatagagtgtctgctattaataactatgctcaaaaattgtgtacctttagctttttaatttgtaaaggggttaataaggaatatttgatgtatagtgccttgactagagatcataatcagccataccacatttgtagaggttttacttgctttaaaaaacctcccacacctccccctgaacctgaaacataaaatgaatgcaattgttgttgttaacttgtttattgcagcttataatggttacaaataaagcaatagcatcacaaatttcacaaataaagcatttttttcactgcattctagttgtggtttgtccaaactcatcaatgtatcttatcatgtctggatcaactggataactcaagctaaccaaaatcatcccaaacttcccaccccataccctattaccactgccaattacctagtggtttcatttactctaaacctgtgattcctctgaattattttcattttaaagaaattgtatttgttaaatatgtactacaaacttagtagttggaagggctaattcactcccaaagaagacaagatatccttgatctgtggatctaccacacacaaggctacttccctgattagcagaactacacaccagggccaggggtcagatatccactgacctttggatggtgctacaagctagtaccagttgagccagataaggtagaagaggccaataaaggagagaacaccagcttgttacaccctgtgagcctgcatgggatggatgacccggagagagaagtgttagagtggaggtttgacagccgcctagcatttcatcacgtggcccgagagctgcatccggagtacttcaagaactgctgatatcgagcttgctacaagggactttccgctggggactttccagggaggcgtggcctgggcgggactggggagtggcgagccctcagatcctgcatataagcagctgctttttgcctgtactgggtctctctggttagaccagatctgagcctgggagctctctggctaactagggaacccactgcttaagcctcaataaagcttgccttgagtgcttcaagtagtgtgtgcccgtctgttgtgtgactctggtaactagagatccctcagacccttttagtcagtgtggaaaatctctagcagtggcgcccgaacagggacttgaaagcgaaagggaaaccagaggagctctctcgacgcaggactcggcttgctgaagcgcgcacggcaagaggcgaggggcggcgactggtgagtacgccaaaaattttgactagcggaggctagaaggagagagatgggtgcgagagcgtcagtattaagcgggggagaattagatcgcgatgggaaaaaattcggttaaggccagggggaaagaaaaaatataaattaaaacatatagtatgggcaagcagggagctagaacgattcgcagttaatcctggcctgttagaaacatcagaaggctgtagacaaatactgggacagctacaaccatcccttcagacaggatcagaagaacttagatcattatataatacagtagcaaccctctattgtgtgcatcaaaggatagagataaaagacaccaaggaagctttagacaagatagaggaagagcaaaacaaaagtaagaccaccgcacagcaagcggccggccgctgatcttcagacctggaggaggagatatgagggacaattggagaagtgaattatataaatataaagtagtaaaaattgaaccattaggagtagcacccaccaaggcaaagagaagagtggtgcagagagaaaaaagagcagtgggaataggagctttgttccttgggttcttgggagcagcaggaagcactatgggcgcagcgtcaatgacgctgacggtacaggccagacaattattgtctggtatagtgcagcagcagaacaatttgctgagggctattgaggcgcaacagcatctgttgcaactcacagtctggggcatcaagcagctccaggcaagaatcctggctgtgaaagatacctaaaggatcaacagctcctggggatttggggttgctctggaaaactcatttgcaccactgctgtgccttggaatgctagttggagtaataaatctctggaacagatttggaatcacacgacctggatggagtgggacagagaaattaacaattacacaagcttaatacactccttaattgaagaatcgcaaaaccagcaagaaaagaatgaacaagaattattggaattagataaatgggcaagtttgtggaattggtttaacataacaaattggctgtggtatataaaattattcataatgatagtaggaggcttggtaggtttaagaatagtttttgctgtactttctatagtgaatagagttaggcagggatattcaccattatcgtttcagacccacctcccaaccccgaggggacccgacaggcccgaaggaatagaagaagaaggtggagagagagacagagacagatccattcgattagtgaacggatctcgacggtatcgccaaatggcagtattcatccacaattttaaaagaaaaggggggattggggggtacagtgcaggggaaagaatagtagacataatagcaacagacatacaaactaaagaattacaaaaacaaattacaaaaattcaaaattttcgggtttattacagggacagcagagatccagtttggatcgataagcttgatatcgaattcctgcagcccgtgaggctccggtgcccgtcagtgggcagagcgcacatcgcccacagtccccgagaagttggggggaggggtcggcaattgaaccggtgcctagagaaggtggcgcggggtaaactgggaaagtgatgtcgtgtactggctccgcctttttcccgagggtgggggagaaccgtatataagtgcagtagtcgccgtgaacgttctttttcgcaacgggtttgccgccagaacacaggtaagtgccgtgtgtggttcccgcgggcctggcctctttacgggttatggcccttgcgtgccttgaattacttccacctggctgcagtacgtgattcttgatcccgagcttcgggttggaagtgggtgggagagttcgaggccttgcgcttaaggagccccttcgcctcgtgcttgagttgaggcctggcctgggcgctggggccgccgcgtgcgaatctggtggcaccttcgcgcctgtctcgctgctttcgataagtctctagccatttaaaatttttgatgacctgctgcgacgctttttttctggcaagatagtcttgtaaatgcgggccaagatctgcacactggtatttcggtttttggggccgcgggcggcgacggggcccgtgcgtcccagcgcacatgttcggcgaggcggggcctgcgagcgcggccaccgagaatcggacgggggtagtctcaagctggccggcctgctctggtgcctggcctcgcgccgccgtgtatcgccccgccctgggcggcaaggctggcccggtcggcaccagttgcgtgagcggaaagatggccgcttcccggccctgctgcagggagctcaaaatggaggacgcggcgctcgggagagcgggcgggtgagtcacccacacaaaggaaaagggcctttccgtcctcagccgtcgcttcatgtgactccacggagtaccgggcgccgtccaggcacctcgattagttctcgagcttttggagtacgtcgtctttaggttggggggaggggttttatgcgatggagtttccccacactgagtgggtggagactgaagttaggccagcttggcacttgatgtaattctccttggaatttgccctttttgagtttggatcttggttcattctcaagcctcagacagtggttcaaagtttttttcttccatttcaggtgtcgtgaggggatctggagctctcgagaattctcacgcgtgccgccaccatggccttaccagtgaccgccttgctcctgccgctggccttgctgctccacgccgccaggccggacatccagatgacacagactacatcctccctgtctgcctctctgggagacagagtcaccatcagttgcagggcaagtcaggacattagtaaatatttaaattggtatcagcagaaaccagatggaactgttaaactcctgatctaccatacatcaagattacactcaggagtcccatcaaggttcagtggcagtgggtctggaacagattattctctcaccattagcaacctggagcaagaagatattgccacttacttttgccaacagggtaatacgcttccgtacacgttcggaggcggcaccaagctggagatcacaggtggcggtggctcgggcggtggtgggtcgggtggcggcggatctgaggtgaaactgcaggagtcaggacctggcctggtggcgccctcacagagcctgtccgtcacatgcactgtctcaggggtctcattacccgactatggtgtaagctggattcgccagcctccacgaaagggtctggagtggctgggagtaatatggggtagtgaaaccacatactataattcagctctcaaatccagactgaccatcatcaaggacaactccaagagccaagttttcttaaaaatgaacagtctgcaaactgatgacacagccatttactactgtgccaaacattattactacggtggtagctatgctatggactactggggccaaggaacctcagtcaccgtctcctcagggaagcctatcccgaaccctctgttgggtctcgatagtaccaatggggccgcaaccacgacgccagcgccgcgaccaccaacaccggcgcccaccatcgcgttgcagcccctgtccctgcgcccagaggcgtgccggccagcggcggggggcgcagtgcacacgagggggctggacttcgcctgtgatttttgggtgctggtggtggttggtggagtcctggcttgctatagcttgctagtaacagtggcctttattattttctgggtgaggagtaagaggagcaggctcctgcacagtgactacatgaacatgactccccgccgccccgggcccacccgcaagcattaccagccctatgccccaccacgcgacttcgcagcctatcgctccaaacggggcagaaagaaactcctgtatatattcaaacaaccatttatgagaccagtacaaactactcaagaggaagatggctgtagctgccgatttccagaagaagaagaaggaggatgtgaactggggggtaccgaattcagcgggtcaggcggatctggaagtggtggtggagaacttgatgaattggtatacttactagatgggccaggttatgaccctatacattgcgatgtagtgacaaggggcggcagccaccttttcaattttggaagcggagctactaacttcagcctgctgaagcaggctggagacgtggaggagaaccctggacctatgattcatcttggtcacatcctcttcttgctgctgttgccagttgctgccgcacaaacaaccccaggtgagaggtcaagtcttcccgccttctatccgggcacaagcgggagttgtagtgggtgtggatctttgtcccttcctatatacatctgggctcctctggctggcacttgcggagtgcttctgctgagtctggttattaccaaacggggcagaaagaaactcctgtatatattcaaacaaccatttatgagaccagtacaaactactcaagaggaagatggctgtagctgccgatttccagaagaagaagaaggaggatgtgaactgagagtgaagttcagcaggagcgcagacgcccccgcgtacaagcagggccagaaccagctctataacgagctcaatctaggacgaagagaggagtacgatgttttggacaagagacgtggccgggaccctgagatggggggaaagccgagaaggaagaaccctcaggaaggcctgtacaatgaactgcagaaagataagatggcggaggcctacagtgagattgggatgaaaggcgagcgccggaggggcaaggggcacgatggcctttaccagggtctcagtacagccaccaaggacacctacgacgcccttcacatgcaggccctgccccctcgcggttctgttgttattgttggtagaattattttatctggtagtggtagtatcacggcctactcccaacagacgcggggcctacttggttgcatcatcactagcctcacaggccgggacaagaaccaggtcgaaggggaggttcaagtggtttctaccgcaacacaatctttcctggcgacctgcgtcaacggcgtgtgctggactgtctaccatggcgctggctcgaagaccctagccggtccaaaaggtccaatcacccaaatgtacaccaatgtagaccaggacctcgtcggctggcaggcgcctccaggggcgcgctccttgacaccatgcacctgtggcagctcggacctttacttggtcacgagacatgctgatgtcattccggtgcgccggcgaggcgacagcaggggaagtctactctcccccaggcccgtctcctacctgaaaggctccgcaggtggtccattgctttgcccttcggggcacgctgtgggcatcttccgggctgctgtgtgcacccggggggtcgcgaaggcggtggacttcgtgcccgttgagtctatggaaactaccatgcggtctggcatggtgagcaagggcgaggaggataacatggccatcatcaaggagttcatgcgcttcaaggtgcacatggagggctccgtgaacggccacgagttcgagatcgagggcgagggcgagggccgcccctacgagggcacccagaccgccaagctgaaggtgaccaagggtggccccctgcccttcgcctgggacatcctgtcccctcagttcatgtacggctccaaggcctacgtgaagcaccccgccgacatccccgactacttgaagctgtccttccccgagggcttcaagtgggagcgcgtgatgaacttcgaggacggcggcgtggtgaccgtgacccaggactcctccctgcaggacggcgagttcatctacaaggtgaagctgcgcggcaccaacttcccctccgacggccccgtaatgcagaagaagaccatgggctgggaggcctcctccgagcggatgtaccccgaggacggcgccctgaagggcgagatcaagcagaggctgaagctgaaggacggcggccactacgacgctgaggtcaagaccacctacaaggccaagaagcccgtgcagctgcccggcgcctacaacgtcaacatcaagttggacatcacctcccacaacgaggactacaccatcgtggaacagtacgaacgcgccgagggccgccactccaccggcggcatggacgagctgtacaagtaagcggccgcgactctagagtcgacctgcaggcatgcaagcttgatatcaagcttatcgataatcaacctctggattacaaaatttgtgaaagattgactggtattcttaactatgttgctccttttacgctatgtggatacgctgctttaatgcctttgtatcatgctattgcttcccgtatggctttcattttctcctccttgtataaatcctggttgctgtctctttatgaggagttgtggcccgttgtcaggcaacgtggcgtggtgtgcactgtgtttgctgacgcaacccccactggttggggcattgccaccacctgtcagctcctttccgggactttcgctttccccctccctattgccacggcggaactcatcgccgcctgccttgcccgctgctggacaggggctcggctgttgggcactgacaattccgtggtgttgtcggggaaatcatcgtcctttccttggctgctcgcctgtgttgccacctggattctgcgcgggacgtccttctgctacgtcccttcggccctcaatccagcggaccttccttcccgcggcctgctgccggctctgcggcctcttccgcgtcttcgccttcgccctcagacgagtcggatctccctttgggccgcctccccgcat

SEQ ID NO: 260 - DNA, 13017 bp, Artificial Sequence
  synthetic vector
cgataccgtcgacctcgagggaattaattcgagctcggtacctttaagaccaatgacttacaaggcagctgtagatcttagccactttttaaaagaaaaggggggactggaagggctaattcactcccaacgaagacaagatctgctttttgcttgtactgggtctctctggttagaccagatctgagcctgggagctctctggctaactagggaacccactgcttaagcctcaataaagcttgccttgagtgcttcaagtagtgtgtgcccgtctgttgtgtgactctggtaactagagatccctcagacccttttagtcagtgtggaaaatctctagcagcatctagaattaattccgtgtattctatagtgtcacctaaatcgtatgtgtatgatacataaggttatgtattaattgtagccgcgttctaacgacaatatgtacaagcctaattgtgtagcatctggcttactgaagcagaccctatcatctctctcgtaaactgccgtcagagtcggtttggttggacgaaccttctgagtttctggtaacgccgtcccgcacccggaaatggtcagcgaaccaatcagcagggtcatcgctagccagatcctctacgccggacgcatcgtggccggcatcaccggcgccacaggtgcggttgctggcgcctatatcgccgacatcaccgatggggaagatcgggctcgccacttcgggctcatgagcgcttgtttcggcgtgggtatggtggcaggccccgtggccgggggactgttgggcgccatctccttgcatgcaccattccttgcggcggcggtgctcaacggcctcaacctactactgggctgcttcctaatgcaggagtcgcataagggagagcgtcgaatggtgcactctcagtacaatctgctctgatgccgcatagttaagccagccccgacacccgccaacacccgctgacgcgccctgacgggcttgtctgctcccggcatccgcttacagacaagctgtgaccgtctccgggagctgcatgtgtcagaggttttcaccgtcatcaccgaaacgcgcgagacgaaagggcctcgtgatacgcctatttttataggttaatgtcatgataataatggtttcttagacgtcaggtggcacttttcggggaaatgtgcgcggaacccctatttgtttatttttctaaatacattcaaatatgtatccgctcatgagacaataaccctgataaatgcttcaataatattgaaaaaggaagagtatgagtattcaacatttccgtgtcgcccttattcccttttttgcggcattttgccttcctgtttttgctcacccagaaacgctggtgaaagtaaaagatgctgaagatcagttgggtgcacgagtgggttacatcgaactggatctcaacagcggtaagatccttgagagttttcgccccgaagaacgttttccaatgatgagcacttttaaagttctgctatgtggcgcggtattatcccgtattgacgccgggcaagagcaactcggtcgccgcatacactattctcagaatgacttggttgagtactcaccagtcacagaaaagcatcttacggatggcatgacagtaagagaattatgcagtgctgccataaccatgagtgataacactgcggccaacttacttctgacaacgatcggaggaccgaaggagctaaccgcttttttgcacaacatgggggatcatgtaactcgccttgatcgttgggaaccggagctgaatgaagccataccaaacgacgagcgtgacaccacgatgcctgtagcaatggcaacaacgttgcgcaaactattaactggcgaactacttactctagcttcccggcaacaattaatagactggatggaggcggataaagttgcaggaccacttctgcgctcggcccttccggctggctggtttattgctgataaatctggagccggtgagcgtgggtctcgcggtatcattgcagcactggggccagatggtaagccctcccgtatcgtagttatctacacgacggggagtcaggcaactatggatgaacgaaatagacagatcgctgagataggtgcctcactgattaagcattggtaactgtcagaccaagtttactcatatatactttagattgatttaaaacttcatttttaatttaaaaggatctaggtgaagatcctttttgataatctcatgaccaaaatcccttaacgtgagttttcgttccactgagcgtcagaccccgtagaaaagatcaaaggatcttcttgagatcctttttttctgcgcgtaatctgctgcttgcaaacaaaaaaaccaccgctaccagcggtggtttgtttgccggatcaagagctaccaactctttttccgaaggtaactggcttcagcagagcgcagataccaaatactgtctttctagtgtagccgtagttaggccaccacttcaagaactctgtagcaccgcctacatacctcgctctgctaatcctgttaccagtggctgctgccagtggcgataagtcgtgtcttaccgggttggactcaagacgatagttaccggataaggcgcagcggtcgggctgaacggggggttcgtgcacacagcccagcttggagcgaacgacctacaccgaactgagatacctacagcgtgagctatgagaaagcgccacgcttcccgaagggagaaaggcggacaggtatccggtaagcggcagggtcggaacaggagagcgcacgagggagcttccagggggaaacgcctggtatctttatagtcctgtcgggtttcgccacctctgacttgagcgtcgatttttgtgatgctcgtcaggggggcggagcctatggaaaaacgccagcaacgcggcctttttacggttcctggccttttgctggccttttgctcacatgttctttcctgcgttatcccctgattctgtggataaccgtattaccgcctttgagtgagctgataccgctcgccgcagccgaacgaccgagcgcagcgagtcagtgagcgaggaagcggaagagcgcccaatacgcaaaccgcctctccccgcgcgttggccgattcattaatgcagctgtggaatgtgtgtcagttagggtgtggaaagtccccaggctccccagcaggcagaagtatgcaaagcatgcatctcaattagtcagcaaccaggtgtggaaagtccccaggctccccagcaggcagaagtatgcaaagcatgcatctcaattagtcagcaaccatagtcccgcccctaactccgcccatcccgcccctaactccgcccagttccgcccattctccgccccatggctgactaattttttttatttatgcagaggccgaggccgcctcggcctctgagctattccagaagtagtgaggaggcttttttggaggcctaggcttttgcaaaaagcttggacacaagacaggcttgcgagatatgtttgagaataccactttatcccgcgtcagggagaggcagtgcgtaaaaagacgcggactcatgtgaaatactggtttttagtgcgccagatctctataatctcgcgcaacctattttcccctcgaacactttttaagccgtagataaacaggctgggacacttcacatgagcgaaaaatacatcgtcacctgggacatgttgcagatccatgcacgtaaactcgcaagccgactgatgccttctgaacaatggaaaggcattattgccgtaagccgtggcggtctgtaccgggtgcgttactggcgcgtgaactgggtattcgtcatgtcgataccgtttgtatttccagctacgatcacgacaaccagcgcgagcttaaagtgctgaaacgcgcagaaggcgatggcgaaggcttcatcgttattgatgacctggtggataccggtggtactgcggttgcgattcgtgaaatgtatccaaaagcgcactttgtcaccatcttcgcaaaaccggctggtcgtccgctggttgatgactatgttgttgatatcccgcaagatacctggattgaacagccgtgggatatgggcgtcgtattcgtcccgccaatctccggtcgctaatcttttcaacgcctggcactgccgggcgttgttctttttaacttcaggcgggttacaatagtttccagtaagtattctggaggctgcatccatgacacaggcaaacctgagcgaaaccctgttcaaaccccgctttaaacatcctgaaacctcgacgctagtccgccgctttaatcacggcgcacaaccgcctgtgcagtcggcccttgatggtaaaaccatccctcactggtatcgcatgattaaccgtctgatgtggatctggcgcggcattgacccacgcgaaatcctcgacgtccaggcacgtattgtgatgagcgatgccgaacgtaccgacgatgatttatacgatacggtgattggctaccgtggcggcaactggatttatgagtgggccccggatctttgtgaaggaaccttacttctgtggtgtgacataattggacaaactacctacagagatttaaagctctaaggtaaatataaaatttttaagtgtataatgtgttaaactactgattctaattgtttgtgtattttagattccaacctatggaactgatgaatgggagcagtggtggaatgcctttaatgaggaaaacctgttttgctcagaagaaatgccatctagtgatgatgaggctactgctgactctcaacattctactcctccaaaaaagaagagaaaggtagaagaccccaaggactttccttcagaattgctaagttttttgagtcatgctgtgtttagtaatagaactcttgcttgctttgctatttacaccacaaaggaaaaagctgcactgctatacaagaaaattatggaaaaatattctgtaacctttataagtaggcataacagttataatcataacatactgttttttcttactccacacaggcatagagtgtctgctattaataactatgctcaaaaattgtgtacctttagctttttaatttgtaaaggggttaataaggaatatttgatgtatagtgccttgactagagatcataatcagccataccacatttgtagaggttttacttgctttaaaaaacctcccacacctccccctgaacctgaaacataaaatgaatgcaattgttgttgttaacttgtttattgcagcttataatggttacaaataaagcaatagcatcacaaatttcacaaataaagcatttttttcactgcattctagttgtggtttgtccaaactcatcaatgtatcttatcatgtctggatcaactggataactcaagctaaccaaaatcatcccaaacttcccaccccataccctattaccactgccaattacctagtggtttcatttactctaaacctgtgattcctctgaattattttcattttaaagaaattgtatttgttaaatatgtactacaaacttagtagttggaagggctaattcactcccaaagaagacaagatatccttgatctgtggatctaccacacacaaggctacttccctgattagcagaactacacaccagggccaggggtcagatatccactgacctttggatggtgctacaagctagtaccagttgagccagataaggtagaagaggccaataaaggagagaacaccagcttgttacaccctgtgagcctgcatgggatggatgacccggagagagaagtgttagagtggaggtttgacagccgcctagcatttcatcacgtggcccgagagctgcatccggagtacttcaagaactgctgatatcgagcttgctacaagggactttccgctggggactttccagggaggcgtggcctgggcgggactggggagtggcgagccctcagatcctgcatataagcagctgctttttgcctgtactgggtctctctggttagaccagatctgagcctgggagctctctggctaactagggaacccactgcttaagcctcaataaagcttgccttgagtgcttcaagtagtgtgtgcccgtctgttgtgtgactctggtaactagagatccctcagacccttttagtcagtgtggaaaatctctagcagtggcgcccgaacagggacttgaaagcgaaagggaaaccagaggagctctctcgacgcaggactcggcttgctgaagcgcgcacggcaagaggcgaggggcggcgactggtgagtacgccaaaaattttgactagcggaggctagaaggagagagatgggtgcgagagcgtcagtattaagcgggggagaattagatcgcgatgggaaaaaattcggttaaggccagggggaaagaaaaaatataaattaaaacatatagtatgggcaagcagggagctagaacgattcgcagttaatcctggcctgttagaaacatcagaaggctgtagacaaatactgggacagctacaaccatcccttcagacaggatcagaagaacttagatcattatataatacagtagcaaccctctattgtgtgcatcaaaggatagagataaaagacaccaaggaagctttagacaagatagaggaagagcaaaacaaaagtaagaccaccgcacagcaagcggccggccgctgatcttcagacctggaggaggagatatgagggacaattggagaagtgaattatataaatataaagtagtaaaaattgaaccattaggagtagcacccaccaaggcaaagagaagagtggtgcagagagaaaaaagagcagtgggaataggagctttgttccttgggttcttgggagcagcaggaagcactatgggcgcagcgtcaatgacgctgacggtacaggccagacaattattgtctggtatagtgcagcagcagaacaatttgctgagggctattgaggcgcaacagcatctgttgcaactcacagtctggggcatcaagcagctccaggcaagaatcctggctgtgaaagatacctaaaggatcaacagctcctggggatttggggttgctctggaaaactcatttgcaccactgctgtgccttggaatgctagttggagtaataaatctctggaacagatttggaatcacacgacctggatggagtgggacagagaaattaacaattacacaagcttaatacactccttaattgaagaatcgcaaaaccagcaagaaaagaatgaacaagaattattggaattagataaatgggcaagtttgtggaattggtttaacataacaaattggctgtggtatataaaattattcataatgatagtaggaggcttggtaggtttaagaatagtttttgctgtactttctatagtgaatagagttaggcagggatattcaccattatcgtttcagacccacctcccaaccccgaggggacccgacaggcccgaaggaatagaagaagaaggtggagagagagacagagacagatccattcgattagtgaacggatctcgacggtatcgccaaatggcagtattcatccacaattttaaaagaaaaggggggattggggggtacagtgcaggggaaagaatagtagacataatagcaacagacatacaaactaaagaattacaaaaacaaattacaaaaattcaaaattttcgggtttattacagggacagcagagatccagtttggatcgataagcttgatatcgaattcctgcagcccgtgaggctccggtgcccgtcagtgggcagagcgcacatcgcccacagtccccgagaagttggggggaggggtcggcaattgaaccggtgcctagagaaggtggcgcggggtaaactgggaaagtgatgtcgtgtactggctccgcctttttcccgagggtgggggagaaccgtatataagtgcagtagtcgccgtgaacgttctttttcgcaacgggtttgccgccagaacacaggtaagtgccgtgtgtggttcccgcgggcctggcctctttacgggttatggcccttgcgtgccttgaattacttccacctggctgcagtacgtgattcttgatcccgagcttcgggttggaagtgggtgggagagttcgaggccttgcgcttaaggagccccttcgcctcgtgcttgagttgaggcctggcctgggcgctggggccgccgcgtgcgaatctggtggcaccttcgcgcctgtctcgctgctttcgataagtctctagccatttaaaatttttgatgacctgctgcgacgctttttttctggcaagatagtcttgtaaatgcgggccaagatctgcacactggtatttcggtttttggggccgcgggcggcgacggggcccgtgcgtcccagcgcacatgttcggcgaggcggggcctgcgagcgcggccaccgagaatcggacgggggtagtctcaagctggccggcctgctctggtgcctggcctcgcgccgccgtgtatcgccccgccctgggcggcaaggctggcccggtcggcaccagttgcgtgagcggaaagatggccgcttcccggccctgctgcagggagctcaaaatggaggacgcggcgctcgggagagcgggcgggtgagtcacccacacaaaggaaaagggcctttccgtcctcagccgtcgcttcatgtgactccacggagtaccgggcgccgtccaggcacctcgattagttctcgagcttttggagtacgtcgtctttaggttggggggaggggttttatgcgatggagtttccccacactgagtgggtggagactgaagttaggccagcttggcacttgatgtaattctccttggaatttgccctttttgagtttggatcttggttcattctcaagcctcagacagtggttcaaagtttttttcttccatttcaggtgtcgtgaggggatctggagctctcgagaattctcacgcgtgccgccaccatggccttaccagtgaccgccttgctcctgccgctggccttgctgctccacgccgccaggccggacatccagatgacacagactacatcctccctgtctgcctctctgggagacagagtcaccatcagttgcagggcaagtcaggacattagtaaatatttaaattggtatcagcagaaaccagatggaactgttaaactcctgatctaccatacatcaagattacactcaggagtcccatcaaggttcagtggcagtgggtctggaacagattattctctcaccattagcaacctggagcaagaagatattgccacttacttttgccaacagggtaatacgcttccgtacacgttcggaggcggcaccaagctggagatcacaggtggcggtggctcgggcggtggtgggtcgggtggcggcggatctgaggtgaaactgcaggagtcaggacctggcctggtggcgccctcacagagcctgtccgtcacatgcactgtctcaggggtctcattacccgactatggtgtaagctggattcgccagcctccacgaaagggtctggagtggctgggagtaatatggggtagtgaaaccacatactataattcagctctcaaatccagactgaccatcatcaaggacaactccaagagccaagttttcttaaaaatgaacagtctgcaaactgatgacacagccatttactactgtgccaaacattattactacggtggtagctatgctatggactactggggccaaggaacctcagtcaccgtctcctcagggaagcctatcccgaaccctctgttgggtctcgatagtaccaatggggccgcaaccacgacgccagcgccgcgaccaccaacaccggcgcccaccatcgcgttgcagcccctgtccctgcgcccagaggcgtgccggccagcggcggggggcgcagtgcacacgagggggctggacttcgcctgtgatttttgggtgctggtggtggttggtggagtcctggcttgctatagcttgctagtaacagtggcctttattattttctgggtgaggagtaagaggagcaggctcctgcacagtgactacatgaacatgactccccgccgccccgggcccacccgcaagcattaccagccctatgccccaccacgcgacttcgcagcctatcgctccaaacggggcagaaagaaactcctgtatatattcaaacaaccatttatgagaccagtacaaactactcaagaggaagatggctgtagctgccgatttccagaagaagaagaaggaggatgtgaactggggggtaccgaattcagcgggtcaggcggatctggaagtggtggtggagaacttgatgaattggtatacttactagatgggccaggttatgaccctatacattgcgatgtagtgacaaggggcggcagccaccttttcaattttggaagcggagctactaacttcagcctgctgaagcaggctggagacgtggaggagaaccctggacctatgattcatcttggtcacatcctcttcttgctgctgttgccagttgctgccgcacaaacaaccccaggtgagaggtcaagtcttcccgccttctatccgggcacaagcgggagttgtagtgggtgtggatctttgtcccttcctatatacatctgggctcctctggctggcacttgcggagtgcttctgctgagtctggttattaccggttctgttgttattgttggtagaattattttatctggtagtggtagtatcacggcctactcccaacagacgcggggcctacttggttgcatcatcactagcctcacaggccgggacaagaaccaggtcgaaggggaggttcaagtggtttctaccgcaacacaatctttcctggcgacctgcgtcaacggcgtgtgctggactgtctaccatggcgctggctcgaagaccctagccggtccaaaaggtccaatcacccaaatgtacaccaatgtagaccaggacctcgtcggctggcaggcgcctccaggggcgcgctccttgacaccatgcacctgtggcagctcggacctttacttggtcacgagacatgctgatgtcattccggtgcgccggcgaggcgacagcaggggaagtctactctcccccaggcccgtctcctacctgaaaggctccgcaggtggtccattgctttgcccttcggggcacgctgtgggcatcttccgggctgctgtgtgcacccggggggtcgcgaaggcggtggacttcgtgcccgttgagtctatggaaactaccatgcggtctagagtgaagttcagcaggagcgcagacgcccccgcgtacaagcagggccagaaccagctctataacgagctcaatctaggacgaagagaggagtacgatgttttggacaagagacgtggccgggaccctgagatggggggaaagccgagaaggaagaaccctcaggaaggcctgtacaatgaactgcagaaagataagatggcggaggcctacagtgagattgggatgaaaggcgagcgccggaggggcaaggggcacgatggcctttaccagggtctcagtacagccaccaaggacacctacgacgcccttcacatgcaggccctgccccctcgcggcatggtgagcaagggcgaggaggataacatggccatcatcaaggagttcatgcgcttcaaggtgcacatggagggctccgtgaacggccacgagttcgagatcgagggcgagggcgagggccgcccctacgagggcacccagaccgccaagctgaaggtgaccaagggtggccccctgcccttcgcctgggacatcctgtcccctcagttcatgtacggctccaaggcctacgtgaagcaccccgccgacatccccgactacttgaagctgtccttccccgagggcttcaagtgggagcgcgtgatgaacttcgaggacggcggcgtggtgaccgtgacccaggactcctccctgcaggacggcgagttcatctacaaggtgaagctgcgcggcaccaacttcccctccgacggccccgtaatgcagaagaagaccatgggctgggaggcctcctccgagcggatgtaccccgaggacggcgccctgaagggcgagatcaagcagaggctgaagctgaaggacggcggccactacgacgctgaggtcaagaccacctacaaggccaagaagcccgtgcagctgcccggcgcctacaacgtcaacatcaagttggacatcacctcccacaacgaggactacaccatcgtggaacagtacgaacgcgccgagggccgccactccaccggcggcatggacgagctgtacaagtaagcggccgcgactctagagtcgacctgcaggcatgcaagcttgatatcaagcttatcgataatcaacctctggattacaaaatttgtgaaagattgactggtattcttaactatgttgctccttttacgctatgtggatacgctgctttaatgcctttgtatcatgctattgcttcccgtatggctttcattttctcctccttgtataaatcctggttgctgtctctttatgaggagttgtggcccgttgtcaggcaacgtggcgtggtgtgcactgtgtttgctgacgcaacccccactggttggggcattgccaccacctgtcagctcctttccgggactttcgctttccccctccctattgccacggcggaactcatcgccgcctgccttgcccgctgctggacaggggctcggctgttgggcactgacaattccgtggtgttgtcggggaaatcatcgtcctttccttggctgctcgcctgtgttgccacctggattctgcgcgggacgtccttctgctacgtcccttcggccctcaatccagcggaccttccttcccgcggcctgctgccggctctgcggcctcttccgcgtcttcgccttcgccctcagacgagtcggatctccctttgggccgcctccccgcat

SEQ ID NO: 261 - DNA, 13017 bp, Artificial Sequence
  synthetic vector
cgataccgtcgacctcgagggaattaattcgagctcggtacctttaagaccaatgacttacaaggcagctgtagatcttagccactttttaaaagaaaaggggggactggaagggctaattcactcccaacgaagacaagatctgctttttgcttgtactgggtctctctggttagaccagatctgagcctgggagctctctggctaactagggaacccactgcttaagcctcaataaagcttgccttgagtgcttcaagtagtgtgtgcccgtctgttgtgtgactctggtaactagagatccctcagacccttttagtcagtgtggaaaatctctagcagcatctagaattaattccgtgtattctatagtgtcacctaaatcgtatgtgtatgatacataaggttatgtattaattgtagccgcgttctaacgacaatatgtacaagcctaattgtgtagcatctggcttactgaagcagaccctatcatctctctcgtaaactgccgtcagagtcggtttggttggacgaaccttctgagtttctggtaacgccgtcccgcacccggaaatggtcagcgaaccaatcagcagggtcatcgctagccagatcctctacgccggacgcatcgtggccggcatcaccggcgccacaggtgcggttgctggcgcctatatcgccgacatcaccgatggggaagatcgggctcgccacttcgggctcatgagcgcttgtttcggcgtgggtatggtggcaggccccgtggccgggggactgttgggcgccatctccttgcatgcaccattccttgcggcggcggtgctcaacggcctcaacctactactgggctgcttcctaatgcaggagtcgcataagggagagcgtcgaatggtgcactctcagtacaatctgctctgatgccgcatagttaagccagccccgacacccgccaacacccgctgacgcgccctgacgggcttgtctgctcccggcatccgcttacagacaagctgtgaccgtctccgggagctgcatgtgtcagaggttttcaccgtcatcaccgaaacgcgcgagacgaaagggcctcgtgatacgcctatttttataggttaatgtcatgataataatggtttcttagacgtcaggtggcacttttcggggaaatgtgcgcggaacccctatttgtttatttttctaaatacattcaaatatgtatccgctcatgagacaataaccctgataaatgcttcaataatattgaaaaaggaagagtatgagtattcaacatttccgtgtcgcccttattcccttttttgcggcattttgccttcctgtttttgctcacccagaaacgctggtgaaagtaaaagatgctgaagatcagttgggtgcacgagtgggttacatcgaactggatctcaacagcggtaagatccttgagagttttcgccccgaagaacgttttccaatgatgagcacttttaaagttctgctatgtggcgcggtattatcccgtattgacgccgggcaagagcaactcggtcgccgcatacactattctcagaatgacttggttgagtactcaccagtcacagaaaagcatcttacggatggcatgacagtaagagaattatgcagtgctgccataaccatgagtgataacactgcggccaacttacttctgacaacgatcggaggaccgaaggagctaaccgcttttttgcacaacatgggggatcatgtaactcgccttgatcgttgggaaccggagctgaatgaagccataccaaacgacgagcgtgacaccacgatgcctgtagcaatggcaacaacgttgcgcaaactattaactggcgaactacttactctagcttcccggcaacaattaatagactggatggaggcggataaagttgcaggaccacttctgcgctcggcccttccggctggctggtttattgctgataaatctggagccggtgagcgtgggtctcgcggtatcattgcagcactggggccagatggtaagccctcccgtatcgtagttatctacacgacggggagtcaggcaactatggatgaacgaaatagacagatcgctgagataggtgcctcactgattaagcattggtaactgtcagaccaagtttactcatatatactttagattgatttaaaacttcatttttaatttaaaaggatctaggtgaagatcctttttgataatctcatgaccaaaatcccttaacgtgagttttcgttccactgagcgtcagaccccgtagaaaagatcaaaggatcttcttgagatcctttttttctgcgcgtaatctgctgcttgcaaacaaaaaaaccaccgctaccagcggtggtttgtttgccggatcaagagctaccaactctttttccgaaggtaactggcttcagcagagcgcagataccaaatactgtctttctagtgtagccgtagttaggccaccacttcaagaactctgtagcaccgcctacatacctcgctctgctaatcctgttaccagtggctgctgccagtggcgataagtcgtgtcttaccgggttggactcaagacgatagttaccggataaggcgcagcggtcgggctgaacggggggttcgtgcacacagcccagcttggagcgaacgacctacaccgaactgagatacctacagcgtgagctatgagaaagcgccacgcttcccgaagggagaaaggcggacaggtatccggtaagcggcagggtcggaacaggagagcgcacgagggagcttccagggggaaacgcctggtatctttatagtcctgtcgggtttcgccacctctgacttgagcgtcgatttttgtgatgctcgtcaggggggcggagcctatggaaaaacgccagcaacgcggcctttttacggttcctggccttttgctggccttttgctcacatgttctttcctgcgttatcccctgattctgtggataaccgtattaccgcctttgagtgagctgataccgctcgccgcagccgaacgaccgagcgcagcgagtcagtgagcgaggaagcggaagagcgcccaatacgcaaaccgcctctccccgcgcgttggccgattcattaatgcagctgtggaatgtgtgtcagttagggtgtggaaagtccccaggctccccagcaggcagaagtatgcaaagcatgcatctcaattagtcagcaaccaggtgtggaaagtccccaggctccccagcaggcagaagtatgcaaagcatgcatctcaattagtcagcaaccatagtcccgcccctaactccgcccatcccgcccctaactccgcccagttccgcccattctccgccccatggctgactaattttttttatttatgcagaggccgaggccgcctcggcctctgagctattccagaagtagtgaggaggcttttttggaggcctaggcttttgcaaaaagcttggacacaagacaggcttgcgagatatgtttgagaataccactttatcccgcgtcagggagaggcagtgcgtaaaaagacgcggactcatgtgaaatactggtttttagtgcgccagatctctataatctcgcgcaacctattttcccctcgaacactttttaagccgtagataaacaggctgggacacttcacatgagcgaaaaatacatcgtcacctgggacatgttgcagatccatgcacgtaaactcgcaagccgactgatgccttctgaacaatggaaaggcattattgccgtaagccgtggcggtctgtaccgggtgcgttactggcgcgtgaactgggtattcgtcatgtcgataccgtttgtatttccagctacgatcacgacaaccagcgcgagcttaaagtgctgaaacgcgcagaaggcgatggcgaaggcttcatcgttattgatgacctggtggataccggtggtactgcggttgcgattcgtgaaatgtatccaaaagcgcactttgtcaccatcttcgcaaaaccggctggtcgtccgctggttgatgactatgttgttgatatcccgcaagatacctggattgaacagccgtgggatatgggcgtcgtattcgtcccgccaatctccggtcgctaatcttttcaacgcctggcactgccgggcgttgttctttttaacttcaggcgggttacaatagtttccagtaagtattctggaggctgcatccatgacacaggcaaacctgagcgaaaccctgttcaaaccccgctttaaacatcctgaaacctcgacgctagtccgccgctttaatcacggcgcacaaccgcctgtgcagtcggcccttgatggtaaaaccatccctcactggtatcgcatgattaaccgtctgatgtggatctggcgcggcattgacccacgcgaaatcctcgacgtccaggcacgtattgtgatgagcgatgccgaacgtaccgacgatgatttatacgatacggtgattggctaccgtggcggcaactggatttatgagtgggccccggatctttgtgaaggaaccttacttctgtggtgtgacataattggacaaactacctacagagatttaaagctctaaggtaaatataaaatttttaagtgtataatgtgttaaactactgattctaattgtttgtgtattttagattccaacctatggaactgatgaatgggagcagtggtggaatgcctttaatgaggaaaacctgttttgctcagaagaaatgccatctagtgatgatgaggctactgctgactctcaacattctactcctccaaaaaagaagagaaaggtagaagaccccaaggactttccttcagaattgctaagttttttgagtcatgctgtgtttagtaatagaactcttgcttgctttgctatttacaccacaaaggaaaaagctgcactgctatacaagaaaattatggaaaaatattctgtaacctttataagtaggcataacagttataatcataacatactgttttttcttactccacacaggcatagagtgtctgctattaataactatgctcaaaaattgtgtacctttagctttttaatttgtaaaggggttaataaggaatatttgatgtatagtgccttgactagagatcataatcagccataccacatttgtagaggttttacttgctttaaaaaacctcccacacctccccctgaacctgaaacataaaatgaatgcaattgttgttgttaacttgtttattgcagcttataatggttacaaataaagcaatagcatcacaaatttcacaaataaagcatttttttcactgcattctagttgtggtttgtccaaactcatcaatgtatcttatcatgtctggatcaactggataactcaagctaaccaaaatcatcccaaacttcccaccccataccctattaccactgccaattacctagtggtttcatttactctaaacctgtgattcctctgaattattttcattttaaagaaattgtatttgttaaatatgtactacaaacttagtagttggaagggctaattcactcccaaagaagacaagatatccttgatctgtggatctaccacacacaaggctacttccctgattagcagaactacacaccagggccaggggtcagatatccactgacctttggatggtgctacaagctagtaccagttgagccagataaggtagaagaggccaataaaggagagaacaccagcttgttacaccctgtgagcctgcatgggatggatgacccggagagagaagtgttagagtggaggtttgacagccgcctagcatttcatcacgtggcccgagagctgcatccggagtacttcaagaactgctgatatcgagcttgctacaagggactttccgctggggactttccagggaggcgtggcctgggcgggactggggagtggcgagccctcagatcctgcatataagcagctgctttttgcctgtactgggtctctctggttagaccagatctgagcctgggagctctctggctaactagggaacccactgcttaagcctcaataaagcttgccttgagtgcttcaagtagtgtgtgcccgtctgttgtgtgactctggtaactagagatccctcagacccttttagtcagtgtggaaaatctctagcagtggcgcccgaacagggacttgaaagcgaaagggaaaccagaggagctctctcgacgcaggactcggcttgctgaagcgcgcacggcaagaggcgaggggcggcgactggtgagtacgccaaaaattttgactagcggaggctagaaggagagagatgggtgcgagagcgtcagtattaagcgggggagaattagatcgcgatgggaaaaaattcggttaaggccagggggaaagaaaaaatataaattaaaacatatagtatgggcaagcagggagctagaacgattcgcagttaatcctggcctgttagaaacatcagaaggctgtagacaaatactgggacagctacaaccatcccttcagacaggatcagaagaacttagatcattatataatacagtagcaaccctctattgtgtgcatcaaaggatagagataaaagacaccaaggaagctttagacaagatagaggaagagcaaaacaaaagtaagaccaccgcacagcaagcggccggccgctgatcttcagacctggaggaggagatatgagggacaattggagaagtgaattatataaatataaagtagtaaaaattgaaccattaggagtagcacccaccaaggcaaagagaagagtggtgcagagagaaaaaagagcagtgggaataggagctttgttccttgggttcttgggagcagcaggaagcactatgggcgcagcgtcaatgacgctgacggtacaggccagacaattattgtctggtatagtgcagcagcagaacaatttgctgagggctattgaggcgcaacagcatctgttgcaactcacagtctggggcatcaagcagctccaggcaagaatcctggctgtgaaagatacctaaaggatcaacagctcctggggatttggggttgctctggaaaactcatttgcaccactgctgtgccttggaatgctagttggagtaataaatctctggaacagatttggaatcacacgacctggatggagtgggacagagaaattaacaattacacaagcttaatacactccttaattgaagaatcgcaaaaccagcaagaaaagaatgaacaagaattattggaattagataaatgggcaagtttgtggaattggtttaacataacaaattggctgtggtatataaaattattcataatgatagtaggaggcttggtaggtttaagaatagtttttgctgtactttctatagtgaatagagttaggcagggatattcaccattatcgtttcagacccacctcccaaccccgaggggacccgacaggcccgaaggaatagaagaagaaggtggagagagagacagagacagatccattcgattagtgaacggatctcgacggtatcgccaaatggcagtattcatccacaattttaaaagaaaaggggggattggggggtacagtgcaggggaaagaatagtagacataatagcaacagacatacaaactaaagaattacaaaaacaaattacaaaaattcaaaattttcgggtttattacagggacagcagagatccagtttggatcgataagcttgatatcgaattcctgcagcccgtgaggctccggtgcccgtcagtgggcagagcgcacatcgcccacagtccccgagaagttggggggaggggtcggcaattgaaccggtgcctagagaaggtggcgcggggtaaactgggaaagtgatgtcgtgtactggctccgcctttttcccgagggtgggggagaaccgtatataagtgcagtagtcgccgtgaacgttctttttcgcaacgggtttgccgccagaacacaggtaagtgccgtgtgtggttcccgcgggcctggcctctttacgggttatggcccttgcgtgccttgaattacttccacctggctgcagtacgtgattcttgatcccgagcttcgggttggaagtgggtgggagagttcgaggccttgcgcttaaggagccccttcgcctcgtgcttgagttgaggcctggcctgggcgctggggccgccgcgtgcgaatctggtggcaccttcgcgcctgtctcgctgctttcgataagtctctagccatttaaaatttttgatgacctgctgcgacgctttttttctggcaagatagtcttgtaaatgcgggccaagatctgcacactggtatttcggtttttggggccgcgggcggcgacggggcccgtgcgtcccagcgcacatgttcggcgaggcggggcctgcgagcgcggccaccgagaatcggacgggggtagtctcaagctggccggcctgctctggtgcctggcctcgcgccgccgtgtatcgccccgccctgggcggcaaggctggcccggtcggcaccagttgcgtgagcggaaagatggccgcttcccggccctgctgcagggagctcaaaatggaggacgcggcgctcgggagagcgggcgggtgagtcacccacacaaaggaaaagggcctttccgtcctcagccgtcgcttcatgtgactccacggagtaccgggcgccgtccaggcacctcgattagttctcgagcttttggagtacgtcgtctttaggttggggggaggggttttatgcgatggagtttccccacactgagtgggtggagactgaagttaggccagcttggcacttgatgtaattctccttggaatttgccctttttgagtttggatcttggttcattctcaagcctcagacagtggttcaaagtttttttcttccatttcaggtgtcgtgaggggatctggagctctcgagaattctcacgcgtgccgccaccatggccttaccagtgaccgccttgctcctgccgctggccttgctgctccacgccgccaggccggacatccagatgacacagactacatcctccctgtctgcctctctgggagacagagtcaccatcagttgcagggcaagtcaggacattagtaaatatttaaattggtatcagcagaaaccagatggaactgttaaactcctgatctaccatacatcaagattacactcaggagtcccatcaaggttcagtggcagtgggtctggaacagattattctctcaccattagcaacctggagcaagaagatattgccacttacttttgccaacagggtaatacgcttccgtacacgttcggaggcggcaccaagctggagatcacaggtggcggtggctcgggcggtggtgggtcgggtggcggcggatctgaggtgaaactgcaggagtcaggacctggcctggtggcgccctcacagagcctgtccgtcacatgcactgtctcaggggtctcattacccgactatggtgtaagctggattcgccagcctccacgaaagggtctggagtggctgggagtaatatggggtagtgaaaccacatactataattcagctctcaaatccagactgaccatcatcaaggacaactccaagagccaagttttcttaaaaatgaacagtctgcaaactgatgacacagccatttactactgtgccaaacattattactacggtggtagctatgctatggactactggggccaaggaacctcagtcaccgtctcctcagggaagcctatcccgaaccctctgttgggtctcgatagtaccaatggggccgcaaccacgacgccagcgccgcgaccaccaacaccggcgcccaccatcgcgttgcagcccctgtccctgcgcccagaggcgtgccggccagcggcggggggcgcagtgcacacgagggggctggacttcgcctgtgatttttgggtgctggtggtggttggtggagtcctggcttgctatagcttgctagtaacagtggcctttattattttctgggtgaggagtaagaggagcaggctcctgcacagtgactacatgaacatgactccccgccgccccgggcccacccgcaagcattaccagccctatgccccaccacgcgacttcgcagcctatcgctccaaacggggcagaaagaaactcctgtatatattcaaacaaccatttatgagaccagtacaaactactcaagaggaagatggctgtagctgccgatttccagaagaagaagaaggaggatgtgaactggggggtaccgaattcagcgggtcaggcggatctggaagtggtggtggagaacttgatgaattggtatacttactagatgggccaggttatgaccctatacattgcgatgtagtgacaaggggcggcagccaccttttcaattttggaagcggagctactaacttcagcctgctgaagcaggctggagacgtggaggagaaccctggacctatgattcatcttggtcacatcctcttcttgctgctgttgccagttgctgccgcacaaacaaccccaggtgagaggtcaagtcttcccgccttctatccgggcacaagcgggagttgtagtgggtgtggatctttgtcccttcctatatacatctgggctcctctggctggcacttgcggagtgctcctgctgagtctggttattaccagagtgaagttcagcaggagcgcagacgcccccgcgtacaagcagggccagaaccagctctataacgagctcaatctaggacgaagagaggagtacgatgttttggacaagagacgtggccgggaccctgagatggggggaaagccgagaaggaagaaccctcaggaaggcctgtacaatgaactgcagaaagataagatggcggaggcctacagtgagattgggatgaaaggcgagcgccggaggggcaaggggcacgatggcctttaccagggtctcagtacagccaccaaggacacctacgacgcccttcacatgcaggccctgccccctcgcggttctgttgttattgttggtagaattattttatctggtagtggtagtatcacggcctactcccaacagacgcggggcctacttggttgcatcatcactagcctcacaggccgggacaagaaccaggtcgaaggggaggttcaagtggtttctaccgcaacacaatctttcctggcgacctgcgtcaacggcgtgtgctggactgtctaccatggcgctggctcgaagaccctagccggtccaaaaggtccaatcacccaaatgtacaccaatgtagaccaggacctcgtcggctggcaggcgcctccaggggcgcgctccttgacaccatgcacctgtggcagctcggacctttacttggtcacgagacatgctgatgtcattccggtgcgccggcgaggcgacagcaggggaagtctactctcccccaggcccgtctcctacctgaaaggctccgcaggtggtccattgctttgcccttcggggcacgctgtgggcatcttccgggctgctgtgtgcacccggggggtcgcgaaggcggtggacttcgtgcccgttgagtctatggaaactaccatgcggtctggcatggtgagcaagggcgaggaggataacatggccatcatcaaggagttcatgcgcttcaaggtgcacatggagggctccgtgaacggccacgagttcgagatcgagggcgagggcgagggccgcccctacgagggcacccagaccgccaagctgaaggtgaccaagggtggccccctgcccttcgcctgggacatcctgtcccctcagttcatgtacggctccaaggcctacgtgaagcaccccgccgacatccccgactacttgaagctgtccttccccgagggcttcaagtgggagcgcgtgatgaacttcgaggacggcggcgtggtgaccgtgacccaggactcctccctgcaggacggcgagttcatctacaaggtgaagctgcgcggcaccaacttcccctccgacggccccgtaatgcagaagaagaccatgggctgggaggcctcctccgagcggatgtaccccgaggacggcgccctgaagggcgagatcaagcagaggctgaagctgaaggacggcggccactacgacgctgaggtcaagaccacctacaaggccaagaagcccgtgcagctgcccggcgcctacaacgtcaacatcaagttggacatcacctcccacaacgaggactacaccatcgtggaacagtacgaacgcgccgagggccgccactccaccggcggcatggacgagctgtacaagtaagcggccgcgactctagagtcgacctgcaggcatgcaagcttgatatcaagcttatcgataatcaacctctggattacaaaatttgtgaaagattgactggtattcttaactatgttgctccttttacgctatgtggatacgctgctttaatgcctttgtatcatgctattgcttcccgtatggctttcattttctcctccttgtataaatcctggttgctgtctctttatgaggagttgtggcccgttgtcaggcaacgtggcgtggtgtgcactgtgtttgctgacgcaacccccactggttggggcattgccaccacctgtcagctcctttccgggactttcgctttccccctccctattgccacggcggaactcatcgccgcctgccttgcccgctgctggacaggggctcggctgttgggcactgacaattccgtggtgttgtcggggaaatcatcgtcctttccttggctgctcgcctgtgttgccacctggattctgcgcgggacgtccttctgctacgtcccttcggccctcaatccagcggaccttccttcccgcggcctgctgccggctctgcggcctcttccgcgtcttcgccttcgccctcagacgagtcggatctccctttgggccgcctccccgcat

SEQ ID NO: 262 - DNA, 24 bp, Artificial Sequence
  synthetic oligonucleotide
gcttcccgagctctataaaagagc

SEQ ID NO: 263 - DNA, 30 bp, Artificial Sequence
  synthetic oligonucleotide
gatctggagctctcgagaattctcacgcgt

SEQ ID NO: 264 - DNA, 30 bp, Artificial Sequence
  synthetic oligonucleotide
cctgcaggtcgactctagagtcgcggccgc

SEQ ID NO: 265 - DNA, 23 bp, Artificial Sequence
  synthetic oligonucleotide
ccagaggttgattatcgataagc

SEQ ID NO: 266 - DNA, 492 bp, Artificial Sequence
  synthetic polynucleotide
ccgataaaataaaagattttatttagtctccagaaaaaggggggaatgaaagaccccacctgtaggtttggcaagctagctgcagtaacgccattttgcaaggcatggaaaaataccaaaccaagaatagagaagttcagatcaagggcgggtacatgaaaatagctaacgttgggccaaacaggatatctgcggtgagcagtttcggccccggcccggggccaagaacagatggtcaccgcagtttcggccccggcccgaggccaagaacagatggtccccagatatggcccaaccctcagcagtttcttaagacccatcagatgtttccaggctcccccaaggacctgaaatgaccctgcgccttatttgaattaaccaatcagcctgcttctcgcttctgttcgcgcgcttctgcttcccgagctctataaaagagctcacaacccctcactcggcgcgccagtcctccgacagactgagtcgcccggg

SEQ ID NO: 267 - DNA, 1184 bp, Artificial Sequence
  synthetic polynucleotide
cgtgaggctccggtgcccgtcagtgggcagagcgcacatcgcccacagtccccgagaagttggggggaggggtcggcaattgaaccggtgcctagagaaggtggcgcggggtaaactgggaaagtgatgtcgtgtactggctccgcctttttcccgagggtgggggagaaccgtatataagtgcagtagtcgccgtgaacgttctttttcgcaacgggtttgccgccagaacacaggtaagtgccgtgtgtggttcccgcgggcctggcctctttacgggttatggcccttgcgtgccttgaattacttccacctggctgcagtacgtgattcttgatcccgagcttcgggttggaagtgggtgggagagttcgaggccttgcgcttaaggagccccttcgcctcgtgcttgagttgaggcctggcctgggcgctggggccgccgcgtgcgaatctggtggcaccttcgcgcctgtctcgctgctttcgataagtctctagccatttaaaatttttgatgacctgctgcgacgctttttttctggcaagatagtcttgtaaatgcgggccaagatctgcacactggtatttcggtttttggggccgcgggcggcgacggggcccgtgcgtcccagcgcacatgttcggcgaggcggggcctgcgagcgcggccaccgagaatcggacgggggtagtctcaagctggccggcctgctctggtgcctggcctcgcgccgccgtgtatcgccccgccctgggcggcaaggctggcccggtcggcaccagttgcgtgagcggaaagatggccgcttcccggccctgctgcagggagctcaaaatggaggacgcggcgctcgggagagcgggcgggtgagtcacccacacaaaggaaaagggcctttccgtcctcagccgtcgcttcatgtgactccacggagtaccgggcgccgtccaggcacctcgattagttctcgagcttttggagtacgtcgtctttaggttggggggaggggttttatgcgatggagtttccccacactgagtgggtggagactgaagttaggccagcttggcacttgatgtaattctccttggaatttgccctttttgagtttggatcttggttcattctcaagcctcagacagtggttcaaagtttttttcttccatttcaggtgtcgtga

SEQ ID NO: 268 - DNA, 180 bp, Artificial Sequence
  synthetic polynucleotide
cgccaaatggcagtattcatccacaattttaaaagaaaaggggggattggggggtacagtgcaggggaaagaatagtagacataatagcaacagacatacaaactaaagaattacaaaaacaaattacaaaaattcaaaattttcgggtttattacagggacagcagagatccagtttgg

SEQ ID NO: 269 - DNA, 592 bp, Artificial Sequence
  synthetic polynucleotide
taatcaacctctggattacaaaatttgtgaaagattgactggtattcttaactatgttgctccttttacgctatgtggatacgctgctttaatgcctttgtatcatgctattgcttcccgtatggctttcattttctcctccttgtataaatcctggttgctgtctctttatgaggagttgtggcccgttgtcaggcaacgtggcgtggtgtgcactgtgtttgctgacgcaacccccactggttggggcattgccaccacctgtcagctcctttccgggactttcgctttccccctccctattgccacggcggaactcatcgccgcctgccttgcccgctgctggacaggggctcggctgttgggcactgacaattccgtggtgttgtcggggaaatcatcgtcctttccttggctgctcgcctgtgttgccacctggattctgcgcgggacgtccttctgctacgtcccttcggccctcaatccagcggaccttccttcccgcggcctgctgccggctctgcggcctcttccgcgtcttcgccttcgccctcagacgagtcggatctccctttgggccgcctccccgcat
